(19) United States
(12) Patent Application Publication
(10) Pub. No.: US 2021/0108267 A1
(43) Pub. Date: Apr. 15, 2021

(54) CRISPR EFFECTOR SYSTEM BASED MULTIPLEX DIAGNOSTICS

(71) Applicants: THE BROAD INSTITUTE, INC., Cambridge, MA (US); MASSACHUSETTS INSTITUTE OF TECHNOLOGY, Cambridge, MA (US); PRESIDENT AND FELLOWS OF HARVARD COLLEGE, Cambridge, MA (US)

(72) Inventors: Feng Zhang, Cambridge, MA (US); Bernd Zetsche, Cambridge, MA (US); Jonathan Gootenberg, Cambridge, MA (US); Omar Abudayyeh, Cambridge, MA (US)

(73) Assignees: THE BROAD INSTITUTE, INC., Cambridge, MA (US); MASSACHUSETTS INSTITUTE OF TECHNOLOGY, Cambridge, MA (US); PRESIDENT AND FELLOWS OF HARVARD COLLEGE, Cambridge, MA (US)

(21) Appl. No.: 16/955,380

(22) PCT Filed: Dec. 20, 2018
(86) PCT No.: PCT/US2018/066940

§ 371 Date: Jun. 18, 2020

Related U.S. Application Data
(60) Provisional application No. 62/610,066, filed on Dec. 22, 2017.
(60) Provisional application No. 62/623,546, filed on Jan. 29, 2018.
(60) Provisional application No. 62/630,814, filed on Feb. 14, 2018.
(60) Provisional application No. 62/741,501, filed on Oct. 4, 2018.

(51) Int. Cl. C12Q 1/6876; C12N 9/22; C12N 15/11; C12Q 1/6804; C12N 15/115

(52) U.S. Cl. CPC C12Q 1/6876; C12N 9/22; C12N 15/11; C12N 2310/16; C12N 15/115; C12N 2310/20; C12N 2800/80; C12Q 1/6804

(57) ABSTRACT

The embodiments disclosed herein utilized RNA targeting effectors to provide a robust CRISPR-based diagnostic with attomolar sensitivity. Embodiments disclosed herein can detect broth DNA and RNA with comparable levels of sensitivity and can differentiate targets from non-targets based on single base pair differences. Moreover, the embodiments disclosed herein can be prepared in freeze-dried format for convenient distribution and point-of-care (POC) applications. Such embodiments are useful in multiple scenarios in human health including, for example, viral detection, bacterial strain typing, sensitive genotyping, and detection of disease-associated cell free DNA.

### CROSS-REFERENCE TO RELATED APPLICATIONS

[0001] This application claims the benefit of U.S. Provisional Application No. 62/610,066, filed Dec. 22, 2017; U.S. Provisional Application No. 62/623,546, filed Jan. 29, 2018; U.S. Provisional Application No. 62/630,814, filed Feb. 14, 2018; and U.S. Provisional Application No. 62/741,501, filed Oct. 4, 2018. The entire contents of the above-identified applications are hereby fully incorporated herein by reference.

### STATEMENT REGARDING FEDERALLY SPONSORED RESEARCH

[0002] This invention was made with government support under grant numbers MH110049 and HL141201 granted by the National Institutes of Health. The government has certain rights in the invention.

### REFERENCE TO AN ELECTRONIC SEQUENCE LISTING

[0003] The contents of the electronic sequence listing (BROD-2448US_ST25.txt; Size is 1,839,228 bytes and it was created on Oct. 19, 2020) is herein incorporated by reference in its entirety.

### TECHNICAL FIELD

[0004] The subject matter disclosed herein is generally directed to rapid diagnostics related to the use of CRISPR effector systems.

### BACKGROUND

[0005] Nucleic acids are a universal signature of biological information. The ability to rapidly detect nucleic acids with high sensitivity and single-base specificity on a portable platform has the potential to revolutionize diagnosis and monitoring for many diseases, provide valuable epidemiological information, and serve as a generalizable scientific tool. Although many methods have been developed for detecting nucleic acids (Du et al., 2017; Green et al., 2014; Kumar et al., 2014; Pardee et al., 2014; Pardee et al., 2016; Urdea et al., 2006), they inevitably suffer from trade-offs among sensitivity, specificity, simplicity, and speed. For example, qPCR approaches are sensitive but are expensive and rely on complex instrumentation, limiting usability to highly trained operators in laboratory settings. Other approaches, such as new methods combining isothermal nucleic acid amplification with portable platforms (Du et al., 2017; Pardee et al., 2016), offer high detection specificity in a point-of-care (POC) setting, but have somewhat limited applications due to low sensitivity. As nucleic acid diagnostics become increasingly relevant for a variety of healthcare applications, detection technologies that provide high specificity and sensitivity at low cost would be of great utility in both clinical and basic research settings.

### SUMMARY

[0006] In one aspect, the invention provides a nucleic acid detection system comprising: two or more CRISPR systems and a masking construct. Each CRISPR system comprises an effector protein and a guide molecule comprising a guide sequence designed to bind to corresponding target molecules; a masking construct; and optionally, nucleic acid amplification reagents to amplify target molecules in a sample. Each masking construct further comprises a cutting motif sequence that is preferentially cut by one of the activated CRISPR systems.

[0007] The two or more CRISPR effector systems may be RNA-targeting effector proteins, DNA-targeting effector proteins, or a combination thereof. The RNA-targeting effector proteins may be a Cas13 protein, such as Cas13a, Cas13b, or Cas13c. The DNA-targeting effector protein may be a Cas12 protein such as Cpf1 and C2c1.

[0008] In further embodiments, the system may further comprise nucleic acid amplification reagents. The nucleic acid amplification reagents may comprise a primer comprising an RNA polymerase promoter. In certain embodiments, sample nucleic acids are amplified to obtain a DNA template comprising an RNA polymerase promoter, whereby a target RNA molecule may be generated by transcription. The nucleic acid may be DNA and amplified by any method described herein. The nucleic acid may be RNA and amplified by a reverse transcription method as described herein. The aptamer sequence may be amplified upon unmasking of the primer binding site, whereby a trigger RNA is transcribed from the amplified DNA product. The target molecule may be a target DNA and the system may further comprise a primer that binds the target DNA and comprises an RNA polymerase promoter.

[0009] In one example embodiment, the CRISPR system effector protein is an RNA-targeting effector protein. Example RNA-targeting effector proteins include Cas13b and C2c2 (now known as Cas13a). It will be understood that the term “C2c2” herein is used interchangeably with “Cas13a”. In another example embodiment, the RNA-targeting effector protein is C2c2. In other embodiments, the C2c2 effector protein is from an organism of a genus selected from the group consisting of: Leptotrichia, Listeria, Corynebacter, Sutterella, Legionella, Treponema, Filifactor, Eubacterium, Streptococcus, Lactobacillus, Mycoplasma, Bacteroides, Flaviivola, Flavobacterium, Sphaerochaeta, Azospirillum, Gluconacetobacter, Neisseria, Roseburia, Parvibaculum, Staphylococcus, Nitratifractor, Mycoplasma, Campylobacter, and Lachnospira, or the C2c2 effector protein is an organism selected from the group consisting of: Leptotrichia shahii, Leptotrichia. wadei, Listeria seeligeri, Clostridium aminophilum, Carnobacterium gallinarum, Paludibacter propionicigenes, Listeria weihenstephanensis, or the C2c2 effector protein is a L. wadei F0279 or L. wadei F0279 (Lw2) C2C2 effector protein. In another embodiment, the one or more guide RNAs are designed to detect a single nucleotide polymorphism, splice variant of a transcript, or a frameshift mutation in a target RNA or DNA.

[0010] In other embodiments, the one or more guide RNAs are designed to bind to one or more target molecules that are diagnostic for a disease state. In still further embodiments, the disease state is an infection, an organ disease, a blood disease, an immune system disease, a cancer, a brain and nervous system disease, an endocrine disease, a pregnancy or childbirth-related disease, an inherited disease, or an environmentally-acquired disease. In still further embodiments, the disease state is cancer or an autoimmune disease or an infection.

[0011] In further embodiments, the one or more guide RNAs are designed to bind to one or more target molecules comprising cancer specific somatic mutations. The cancer specific mutation may confer drug resistance. The drug resistance mutation may be induced by treatment with ibrutinib, erlotinib, imatinib, gefitinib, crizotinib, trastuzumab, vemurafenib, RAF/MEK, check point blockade therapy, or antiestrogen therapy. The cancer specific mutations may be present in one or more genes encoding a protein selected from the group consisting of Programmed Death-Ligand 1 (PD-L1), androgen receptor (AR), Bruton's Tyrosine Kinase (BTK), Epidermal Growth Factor Receptor (EGFR), BCR-Abl, c-kit, PIK3CA, HER2, EML4-ALK, KRAS, ALK, ROS1, AKT1, BRAF, MEK1, MEK2, NRAS, RAC1, and ESR1. The cancer specific mutation may be a mutation in a gene selected from the group consisting of CASP8, B2M, PIK3CA, SMC1A, ARID5B, TET2, ALPK2, COL5A1, TP53, DNER, NCOR1, MORC4, CIC, IRF6, MYOCD, ANKLE1, CNKSR1, NF1, SOS1, ARID2, CUL4B, DDX3X, FUBP1, TCP11L2, HLA-A, B or C, CSNK2A1, MET, ASXL1, PD-L1, PD-L2, IDO1, IDO2, ALOX12B and ALOX15B, or copy number gain, excluding whole-chromosome events, impacting any of the following chromosomal bands: 6q16.1-q21, 6q22.31-q24.1, 6q25.1-q26, 7p11.2-q11.1, 8p23.1, 8p11.23-p11.21 (containing IDOL IDO2), 9p24.2-p23 (containing PDL1, PDL2), 10p15.3, 10p15.1-p13, 11p14.1, 12p13.32-p13.2, 17p13.1 (containing ALOX12B, ALOX15B), and 22q11.1-q11.21.

[0012] In further embodiments, the one or more guide RNAs may be designed to bind to one or more target molecules comprising loss-of-heterozygosity (LOH) markers.

[0013] In further embodiments, the one or more guide RNAs may be designed to bind to one or more target molecules comprising single nucleotide polymorphisms (SNP). The disease may be heart disease and the target molecules may be VKORC1, CYP2C9, and CYP2C19.

[0014] In further embodiments, the disease state may be a pregnancy or childbirth-related disease or an inherited disease. The sample may be a blood sample or mucous sample. The disease may be selected from the group consisting of Trisomy 13, Trisomy 16, Trisomy 18, Klinefelter syndrome (47, XXY), (47, XYY) and (47, XXX), Turner syndrome, Down syndrome (Trisomy 21), Cystic Fibrosis, Huntington's Disease, Beta Thalassaemia, Myotonic Dystrophy, Sickle Cell Anemia, Porphyria, Fragile-X-Syndrome, Robertsonian translocation, Angelman syndrome, DiGeorge syndrome and Wolf-Hirschhorn Syndrome.

[0015] In further embodiments, the infection is caused by a virus, a bacterium, or a fungus, or the infection is a viral infection. In specific embodiments, the viral infection is caused by a double-stranded RNA virus, a positive sense RNA virus, a negative sense RNA virus, a retrovirus, or a combination thereof, or the viral infection is caused by a Coronaviridae virus, a Picornaviridae virus, a Caliciviridae virus, a Flaviviridae virus, a Togaviridae virus, a Bornaviridae, a Filoviridae, a Paramyxoviridae, a Pneumoviridae, a Rhabdoviridae, an Arenaviridae, a Bunyaviridae, an Orthomyxoviridae, or a Deltavirus, or the viral infection is caused by Coronavirus, SARS, Poliovirus, Rhinovirus, Hepatitis A, Norwalk virus, Yellow fever virus, West Nile virus, Hepatitis C virus, Dengue fever virus, Zika virus, Rubella virus, Ross River virus, Sindbis virus, Chikungunya virus, Borna disease virus, Ebola virus, Marburg virus, Measles virus, Mumps virus, Nipah virus, Hendra virus, Newcastle disease virus, Human respiratory syncytial virus, Rabies virus, Lassa virus, Hantavirus, Crimean-Congo hemorrhagic fever virus, Influenza, or Hepatitis D virus.

[0016] In other embodiments of the invention, the RNA-based masking construct suppresses generation of a detectable positive signal or the RNA-based masking construct suppresses generation of a detectable positive signal by masking the detectable positive signal, or generating a detectable negative signal instead, or the RNA-based masking construct comprises a silencing RNA that suppresses generation of a gene product encoded by a reporting construct, wherein the gene product generates the detectable positive signal when expressed.

[0017] In further embodiments, the RNA-based masking construct is a ribozyme that generates the negative detectable signal, and wherein the positive detectable signal is generated when the ribozyme is deactivated, or the ribozyme converts a substrate to a first color and wherein the substrate converts to a second color when the ribozyme is deactivated.

[0018] In other embodiments, the RNA-based masking agent is an RNA aptamer, or the aptamer sequesters an enzyme, wherein the enzyme generates a detectable signal upon release from the aptamer by acting upon a substrate, or the aptamer sequesters a pair of agents that when released from the aptamers combine to generate a detectable signal.

[0019] In another embodiment, the RNA-based masking construct comprises an RNA oligonucleotide to which a detectable ligand and a masking component are attached. In another embodiment, the detectable ligand is a fluorophore and the masking component is a quencher molecule, or the reagents to amplify target RNA molecules such as, but not limited to, NASBA or RPA reagents.

[0020] In another aspect, the invention provides a diagnostic device comprising one or more individual discrete volumes, each individual discrete volume comprising a CRISPR effector protein, one or more guide RNAs designed to bind to corresponding target molecule, an RNA-based masking construct, and optionally further comprise nucleic acid amplification reagents.

[0021] In another aspect, the invention provides a diagnostic device comprising one or more individual discrete volumes, each individual discrete volume comprising a CRISPR effector protein, one or more guide RNAs designed to bind to a trigger RNA, one or more detection aptamers comprising a masked RNA polymerase promoter binding site or a masked primer binding site, and optionally further comprising nucleic acid amplification reagents.

[0022] In some embodiments, the individual discrete volumes are droplets, or the individual discrete volumes are defined on a solid substrate, or the individual discrete volumes are microwells, or the individual discrete volumes are spots defined on a substrate, such as a paper substrate.

[0023] In one embodiment, the RNA targeting effector protein is a CRISPR Type VI RNA-targeting effector protein such as C2c2 or Cas13b. In certain example embodiments, the C2c2 effector protein is from an organism selected from the group consisting of: Leptotrichia, Listeria, Corynebacter, Sutterella, Legionella, Treponema, Filifactor, Eubacterium, Streptococcus, Lactobacillus, Mycoplasma, Bacteroides, Flaviivola, Flavobacterium, Sphaerochaeta, Azospirillum, Gluconacetobacter, Neisseria, Roseburia, Parvibaculum, Staphylococcus, Nitratifractor, Mycoplasma and Campylobacter, or the C2c2 effector protein is selected from the group consisting of: Leptotrichia shahii, L. wadei, Listeria seeligeri, Lachnospiraceae bacterium, Clostridium aminophilum, Carnobacterium gallinarum, Paludibacter propionicigenes, Listeria weihenstephanensis, Listeriaceae bacterium, and Rhodobacter capsulatus, the C2c2 effector protein is a L. wadei F0279 or L. wadei F0279 (Lw2) C2c2 effector protein. In another embodiment, the one or more guide RNAs are designed to bind to one or more target RNA sequences that are diagnostic for a disease state.

[0024] In certain example embodiments, the RNA-based masking construct suppresses generation of a detectable positive signal, or the RNA-based masking construct suppresses generation of a detectable positive signal by masking the detectable positive signal, or generating a detectable negative signal instead, or the RNA-based masking construct comprises a silencing RNA that suppresses generation of a gene product encoded by a reporting construct, wherein the gene product generates the detectable positive signal when expressed.

[0025] In another example embodiment, the RNA-based masking construct is a ribozyme that generates a negative detectable signal, and wherein the positive detectable signal is generated when the ribozyme is deactivated. In one example embodiment, the ribozyme converts a substrate to a first color and wherein the substrate converts to a second color when the ribozyme is deactivated. In another example embodiment, the RNA-based masking agent is an aptamer that sequesters an enzyme, wherein the enzyme generates a detectable signal upon release from the aptamer by acting upon a substrate, or the aptamer sequesters a pair of agents that when released from the aptamers combine to generate a detectable signal.

[0026] In another example embodiment, the RNA-based masking construct comprises an RNA oligonucleotide to which are attached a detectable ligand oligonucleotide and a masking component. In certain example embodiments, the detectable ligand is a fluorophore and the masking component is a quencher molecule.

[0027] In another aspect, the invention provides a method for detecting target molecules in samples, comprising: distributing a sample or set of samples into one or more individual discrete volumes, the individual discrete volumes comprising two or more CRISPR system comprising an effector protein, one or more guide RNAs, a masking construct; incubating the sample or set of samples under conditions sufficient to allow binding of the one or more guide RNAs to one or more target molecules; activating the two or more CRISPR effector protein via binding of the one or more guide RNAs to the one or more target molecules, wherein activating the CRISPR effector protein results in modification of the RNA-based masking construct such that a detectable positive signal is produced; and detecting the detectable positive signal, wherein detection of the detectable positive signal indicates a presence of one or more target molecules in the sample.

[0028] In certain example embodiments, such methods further comprise amplifying the sample RNA or the trigger RNA. In other embodiments, amplifying RNA comprises amplification by NASBA or RPA.

[0029] In certain example embodiments, the CRISPR effector protein is a CRISPR Type VI RNA-targeting effector protein, such as C2c2 or Cas13b. In other example embodiments, the C2c2 effector protein is from an organism selected from the group consisting of: Leptotrichia, Listeria, Corynebacter, Sutterella, Legionella, Treponema, Filifactor, Eubacterium, Streptococcus, Lactobacillus, Mycoplasma, Bacteroides, Flaviivola, Flavobacterium, Sphaerochaeta, Azospirillum, Gluconacetobacter, Neisseria, Roseburia, Parvibaculum, Staphylococcus, Nitratifractor, Mycoplasma and Campylobacter, or the C2c2 effector protein is selected from the group consisting of: Leptotrichia shahii, L. wadei, Listeria seeligeri, Lachnospiraceae bacterium, Clostridium aminophilum, Carnobacterium gallinarum, Paludibacter propionicigenes, Listeria weihenstephanensis, Listeriaceae bacterium, and Rhodobacter capsulatus. In a specific embodiment, the C2c2 effector protein is a L. wadei F0279 or L. wadei F0279 (Lw2) C2C2 effector protein. In certain example embodiments, the Cas12 protein is Cpf1. Cpf1 may be selected from an organism of the genus consisting of; Streptococcus, Campylobacter, Nitratifractor, Staphylococcus, Parvibaculum, Roseburia, Neisseria, Gluconacetobacter, Azospirillum, Sphaerochaeta, Lactobacillus, Eubacterium, Corynebacter, Carnobacterium, Rhodobacter, Listeria, Paludibacter, Clostridium, Lachnospiraceae, Clostridiaridium, Leptotrichia, Francisella, Legionella, Alicyclobacillus, Methanomethyophilus, Porphyromonas, Prevotella, Bacteroidetes, Helcococcus, Letospira, Desulfovibrio, Desulfonatronum, Opitutaceae, Tuberibacillus, Bacillus, Brevibacilus, Methylobacterium or Acidaminococcus; e.g., a chimeric effector protein comprising a first fragment and a second fragment wherein each of the first and second fragments is selected from a Cpf1 of an organism comprising Streptococcus, Campylobacter, Nitratifractor, Staphylococcus, Parvibaculum, Roseburia, Neisseria, Gluconacetobacter, Azospirillum, Sphaerochaeta, Lactobacillus, Eubacterium, Corynebacter, Carnobacterium, Rhodobacter, Listeria, Paludibacter, Clostridium, Lachnospiraceae, Clostridiaridium, Leptotrichia, Francisella, Legionella, Alicyclobacillus, Methanomethyophilus, Porphyromonas, Prevotella, Bacteroidetes, Helcococcus, Letospira, Desulfovibrio, Desulfonatronum, Opitutaceae, Tuberibacillus, Bacillus, Brevibacilus, Methylobacterium or Acidaminococcus. In certain example embodiments, the Cpf1 is selected from one or more the following Acidaminococcus sp. BV3L6 Cpf1 (AsCpf1); Francisella tularensis subsp. Novicida U112 Cpf1 (FnCpf1); L. bacterium MC2017 Cpf1 (Lb3Cpf1); Butyrivibrio proteoclasticus Cpf1 (BpCpf1); Parcubacteria bacterium GWC2011_GWC2_44_17 Cpf1 (PbCpf1); Peregrinibacteria bacterium GW2011_GWA_33_10 Cpf1 (PeCpf1); Leptospira inadai Cpf1 (LiCpf1); Smithella sp. SC_K08D17 Cpf1 (SsCpf1); L. bacterium MA2020 Cpf1 (Lb2Cpf1); Porphyromonas crevioricanis Cpf1 (PcCpf1); Porphyromonas macacae Cpf1 (PmCpf1); Candidatus Methanoplasma termitum Cpf1 (CMtCpf1); Eubacterium eligens Cpf1 (EeCpf1); Moraxella bovoculi 237 Cpf1 (MbCpf1); Prevotella disiens Cpf1 (PdCpf1); or L. bacterium ND2006 Cpf1 (LbCpf1).

[0030] In certain example embodiments, the Cas12 protein is a C2c1 protein. C2c1 may be selected from an organism from the genus consisting of Alicyclobacillus, Desulfovibrio, Desulfonatronum, Opitutaceae, Tuberibacillus, Bacillus, Brevibacillus, Candidatus, Desulfatirhabdium, Elusimicrobia, Citrobacter, Methylobacterium, Omnitrophicai, Phycisphaerae, Planctomycetes, Spirochaetes, and Verrucomicrobiaceae. In certain example embodiments, the C2c1 may be selected from one or more of the following; Alicyclobacillus acidoterrestris (e.g., ATCC 49025), Alicyclobacillus contaminans (e.g., DSM 17975), Alicyclobacillus macrosporangiidus (e.g. DSM 17980), Bacillus hisashii strain C4, Candidatus Lindowbacteria bacterium RIFCSPLOWO2, Desulfovibrio inopinatus (e.g., DSM 10711), Desulfonatronum thiodismutans (e.g., strain MLF-1), Elusimicrobia bacterium RIFOXYA12, Omnitrophica WOR_2 bacterium RIFCSPHIGHO2, Opitutaceae bacterium TAV5, Phycisphaerae bacterium ST-NAGAB-D1, Planctomycetes bacterium RBG_13_46_10, Spirochaetes bacterium GWB1_27_13, Verrucomicrobiaceae bacterium UBA2429, Tuberibacillus calidus (e.g., DSM 17572), Bacillus thermoamylovorans (e.g., strain B4166), Brevibacillus sp. CF112, Bacillus sp. NSP2.1, Desulfatirhabdium butyrativorans (e.g., DSM 18734), Alicyclobacillus herbarius (e.g., DSM 13609), Citrobacter freundii (e.g., ATCC 8090), Brevibacillus agri (e.g., BAB-2500), Methylobacterium nodulans (e.g., ORS 2060).

[0031] In certain example embodiments, the one or more guide RNAs are designed to bind to one or more target molecules that are diagnostic for a disease state. In certain other example embodiments, the disease state is an infection, an organ disease, a blood disease, an immune system disease, a cancer, a brain and nervous system disease, an endocrine disease, a pregnancy or childbirth-related disease, an inherited disease, or an environmentally-acquired disease, cancer, or a fungal infection, a bacterial infection, a parasite infection, or a viral infection. In certain example embodiments, the masking construct suppresses generation of a detectable positive signal, or the masking construct suppresses generation of a detectable positive signal by masking the detectable positive signal, or generating a detectable negative signal instead, or the masking construct comprises a silencing RNA that suppresses generation of a gene product encoded by a reporting construct, wherein the gene product generates the detectable positive signal when expressed, or the masking construct is a ribozyme that generates the negative detectable signal, and wherein the positive detectable signal is generated when the ribozyme is inactivated. In other example embodiments, the ribozyme converts a substrate to a first state and wherein the substrate converts to a second state when the ribozyme is inactivated, or the masking agent is an aptamer, or the aptamer sequesters an enzyme, wherein the enzyme generates a detectable signal upon release from the aptamer by acting upon a substrate, or the aptamer sequesters a pair of agents that when released from the aptamers combine to generate a detectable signal. In still further embodiments, the RNA masking construct comprises an RNA or DNA oligonucleotide with a detectable ligand on a first end of the RNA or DNA oligonucleotide and a masking component on a second end of the RNA or DNA oligonucleotide, or the detectable ligand is a fluorophore and the masking component is a quencher molecule.

[0032] In another aspect, the invention provides a lateral flow device comprising a substrate with a first end, wherein the first end comprises a sample loading portion and a first region loaded with a detectable ligand, two or more CRISPR effector systems, two or more detection constructs, one or more first capture regions, each comprising a first binding agent, two or more second capture regions, each comprising a second binding agent, wherein each of the two or more CRISPR effector systems comprises a CRISPR effector protein and one or more guide sequences, each guide sequence configured to bind one or more target molecules.

[0033] In some embodiments, each of the two or more detection constructs comprises an RNA or DNA oligonucleotide, comprising a first molecule on a first end and a second molecule on a second end. In specific embodiments, the lateral flow device may comprise two CRISPR effector systems and two detection constructs. In even more specific embodiments, the lateral flow device may comprise four CRISPR effector systems and four detection constructs.

[0034] The sample loading portion may further comprise one or more amplification reagents to amplify the one or more target molecules.

[0035] In some embodiments, a first detection construct comprises FAM as a first molecule and biotin as a second molecule or vice versa and a second detection construct comprises FAM as a first molecule and Digoxigenin (DIG) as a second molecule or vice versa. In some embodiments, the CRISPR effector protein is an RNA-targeting effector protein. In some embodiments, the RNA-targeting effector protein is C2c2. In some embodiments, the RNA-targeting effector protein is Cas13b.

[0036] In some embodiments, a first detection construct may comprise Tye665 as a first molecule and Alexa-fluor-488 as a second molecule or vice versa; a second detection construct may comprise Tye665 as a first molecule and FAM as a second molecule or vice versa; a third detection construct may comprise Tye665 as a first molecule and biotin as a second molecule or vice versa; and a fourth detection construct may comprise Tye665 as a first molecule and DIG as a second molecule or vice versa.

[0037] In some embodiments, the CRISPR effector protein may be an RNA-targeting or a DNA-targeting effector protein. The RNA targeting effector may be C2c2 or Cas13b. In some embodiments, the DNA-targeting effector protein is Cas12a.

[0038] These and other aspects, objects, features, and advantages of the example embodiments will become apparent to those having ordinary skill in the art upon consideration of the following detailed description of illustrated example embodiments.

### BRIEF DESCRIPTION OF THE DRAWINGS

[0039] FIG. 1—is a schematic of an example C2c2 based CRISPR effector system.

[0040] FIGS. 2A-2F—provide (FIG. 2A) schematic of the CRISPR/C2c2 locus from Leptotrichia wadei. Representative crRNA structures from LwC2c2 and LshC2c2 systems are shown. (SEQ ID NOS: 1 and 2) (FIG. 2B) Schematic of in vivo bacterial assay for C2c2 activity. A protospacer is cloned upstream of the beta-lactamase gene in an ampicillin-resistance plasmid, and this construct is transformed into E. coli expressing C2c2 in conjunction with either a targeting or non-targeting spacer. Successful transformants are counted to quantify activity. (FIG. 2C) Quantitation of LwC2c2 and LshC2c2 in vivo activity. (n=2 biological replicates; bars represent mean±s.e.m.) (FIG. 2D) Final size exclusion gel filtration of LwC2c2. (FIG. 2E) Coomassie blue stained acrylamide gel of LwC2c2 stepwise purification. (FIG. 2F) Activity of LwC2c2 against different PFS targets. LwC2c2 was targeted against fluorescent RNA with variable 3′ PFS flanking the spacer, and reaction products were visualized on denaturing gel. LwC2c2 shows a slight preference against G PFS.

[0041] FIG. 3—Shows detection of an example masking construct at different dilutions using 1 μg, 100 ng, 10 ng, and 1 ng of target with 4 different amounts of protein/crRNA (1:4, 1:16, 1:32, 1:64) with 2 pools of crRNAs, no crRNA condition, technical duplicates, in (96+48)*2=288 reactions, measured in 5 min interval over 3 hours.

[0042] FIG. 4—Shows detection of an example masking construct at different dilutions using 1 μg, 100 ng, 10 ng, and 1 ng of target with 4 different amounts of protein/crRNA (1:4, 1:16, 1:32, 1:64) with 2 pools of crRNAs, no crRNA condition, technical duplicates, in (96+48)*2=288 reactions, measured in 5 min interval over 3 hours.

[0043] FIG. 5—Shows detection of an example masking construct at different dilutions using 1 μg, 100 ng, 10 ng, and 1 ng of target with 4 different amounts of protein/crRNA (1:4, 1:16, 1:32, 1:64) with 2 pools of crRNAs, no crRNA condition, technical duplicates, in (96+48)*2=288 reactions, measured in 5 min interval over 3 hours.

[0044] FIG. 6—Shows detection of an example masking construct at different dilutions using 1 μg, 100 ng, 10 ng, and 1 ng of target with 4 different amounts of protein/crRNA (1:4, 1:16, 1:32, 1:64) with 2 pools of crRNAs, no crRNA condition, technical duplicates, in (96+48)*2=288 reactions, measured in 5 min interval over 3 hours.

[0045] FIG. 7—provides a schematic of an example detection scheme using a masking construct and CRISPR effector protein, in accordance with certain example embodiments.

[0046] FIG. 8—provides a set of graphs showing changes in fluorescence over time when detecting a target using different pools of guide RNAs.

[0047] FIG. 9—provides a graph showing the normalized fluorescence detected across different dilutions of target RNA at varying concentrations of CRISPR effector protein.

[0048] FIG. 10—is a schematic showing the general steps of a NASBA amplification reaction.

[0049] FIG. 11—provides a graph showing detection of nucleic acid target ssRNA 1 amplified by NASBA with three different primer sets and then subjected to C2c2 collateral detection using a quenched fluorescent probe. (n=2 technical replicates; bars represent mean±s.e.m.)

[0050] FIG. 12—provides a graph showing that the collateral effect may be used to detect the presence of a lentiviral target RNA.

[0051] FIG. 13—provides a graph demonstrating that the collateral effect and NASBA can detect species at aM concentrations.

[0052] FIG. 14—provides a graph demonstrating that the collateral effect and NASBA quickly discriminate low concentration samples.

[0053] FIG. 15—Shows that normalized fluorescence at particular time points is predictive of sample input concentration. Fluorescence measurements from Cas13a detection without amplification are correlated with input RNA concentration. (n=2 biological replicates; bars represent mean±s.e.m.).

[0054] FIG. 16—provides a schematic of the RPA reaction, showing the participating components in the reaction.

[0055] FIG. 17—schematic of SHERLOCK; provides a schematic showing detection of both DNA or RNA targets via incorporation of an RPA or an RT-RPA step accordingly. Upon recognition of target RNA, the collateral effect causes C2c2 to cut the cleavage reporter, generating fluorescence. Single-molecule amounts of RNA or DNA can be amplified to DNA via recombinase polymerase amplification (RPA) and transcribed to produce RNA, which is then detected by C2c2.

[0056] FIG. 18—provides a schematic of ssRNA target detected via the C2c2 collateral detection (SEQ ID NOS: 3 and 4).

[0057] FIG. 19—provides a set of graphs demonstrating single molecule DNA detection using RPA (i.e. within 15 minutes of C2c2 addition).

[0058] FIG. 20—provides a set of graphs demonstrating that mixing T7 polymerase into a RPA reaction does adversely affect DNA detection.

[0059] FIG. 21—provides a set of graphs demonstrating that mixing polymerase into an RPA reaction does not adversely affect DNA detection.

[0060] FIG. 22—provides a graph demonstrating that RPA, T7 transcription, and C2c2 detection reactions are compatible and achieve single molecule detection when incubated simultaneously (n=2 technical replicates; bars represent mean±s.e.m.).

[0061] FIG. 23—provides a set of graphs demonstrating the efficacy of quick RPA-RNA time incubations.

[0062] FIG. 24—provides a set of graphs demonstrating that increasing T7 polymerase amount boosts sensitivity for RPA-RNA.

[0063] FIG. 25—provides a set of graphs showing results from an RPA-DNA detection assay using a one-pot reaction with 1.5× enzymes. Single molecule (2 aM) detection achieved as early as 30 minutes.

[0064] FIG. 26—provides a set of graphs demonstrating that an RPA-DNA one-pot reaction demonstrates a quantitative decrease in fluorescence relative to input concentration. The fitted curve reveals relationship between target input concentration and output fluorescence.

[0065] FIGS. 27A, 27B—provide a set of graphs demonstrating that (FIG. 27A) C2c2 detection of RNA without amplification can detect ssRNA target at concentrations down to 50 fM. (n=2 technical replicates; bars represent mean±s.e.m.), and that (FIG. 27B) the RPA-C2c2 reaction is capable of single-molecule DNA detection (n=4 technical replicates; bars represent mean±s.e.m.).

[0066] FIG. 28—provides a set of graphs demonstrating that a C2c2 signal generated in accordance with certain example embodiments can detect a 20 pM target on a paper substrate.

[0067] FIG. 29—provides a graph showing that a specific RNAse inhibitor is cable of removing background signal on paper.

[0068] FIG. 30 is a set of graphs showing detection using systems in accordance with certain example embodiments on glass fiber substrates.

[0069] FIGS. 31A-31D—provide a set of graphs providing (FIG. 31A) a schematic of Zika RNA detection in accordance with certain example embodiments. Lentivirus was packaged with Zika RNA or homologous Dengue RNA fragments targeted by C2c2 collateral detection. Media is harvested after 48 hours and subjected to thermal lysis, RT-RPA, and C2c2 detection. (FIG. 31B) RT-RAP-C2c2 detection is capable of highly sensitive detection of the Zika lentiviral particles (n=4 technical replicates, two-tailed Student t-test; *****, p<0.0001; bars represent mean±s.e.m.) (FIG. 31C) A schematic of Zika RNA detection using freeze-dried C2c2 on paper, in accordance with certain example embodiments. (FIG. 31D) The paper-based assay is capable of highly sensitive detection of Zika lentiviral particles (n-4 technical replicates, two-tailed Student t-test; ****, p<0.0001; **, p<0.01, bars represent mean±s.e.m.).

[0070] FIGS. 32A, 32B—provide a set of graphs demonstrating (FIG. 32A) A schematic for C2c2 detection of Zika RNA isolated from human serum. Zika RNA in serum is subjected to reverse transcription, RNase H degradation of the RNA, RPA of the cDNA, and C2c2 detection. (FIG. 32B) C2c2 is capable of highly sensitive detection of human Zika serum samples. Concentrations of Zika RNA shown were verified by qPCR (n=4 technical replicates, two-tailed Student t-test; ****, p<0.0001; bars represent mean±s.e.m.).

[0071] FIGS. 33A-33G—provide a set of graphs demonstrating (FIG. 33A) freeze-dried C2c2 is capable of sensitive detection of ssRNA 1 in the low femtomolar range. C2c2 is capable of rapid detection of a 200 pM ssRNA 1 target on paper in liquid form (FIG. 33B) or freeze dried (FIG. 33C). The reaction is capable of sensitive detection of synthesized Zika RNA fragments in solution (FIG. 33D) (n=3) and in freeze-dried form (FIG. 33E) (n=3). (FIG. 33F) Quantitative curve for human zika cDNA detection showing significant correlation between input concentration and detected fluorescence. (FIG. 33G) C2c2 detection of ssRNA 1 performed in the presence of varying amounts of human serum (n=2 technical replicates, unless otherwise noted; bars represent mean±s.e.m.).

[0072] FIGS. 34A-34C—provide (FIG. 34A) schematic of C2c2 detection of 16S rRNA gene from bacterial genomes using a universal V3 RPA primer set, and the ability to achieve sensitive and specific detection of (FIG. 34B) E. coli or (FIG. 34C) P. aeruginosa gDNA using an assay conducted in accordance with certain example embodiments (n=4 technical replicates, two-tailed Student t-test; ****, p<0.0001; bars represent mean±s.e.m.). Ec, Escherichia coli; Kp, Klebsiella pneumoniae; Pa, Pseudomonas aeruginosa; Mt, Mycobacterium tuberculosis; Sa, Staphylococcus aureus.

[0073] FIGS. 35A, 35B—provide a set of graphs demonstrating (FIG. 35A) detection of two different carbapenem-resistance genes (KPC and NDM-1) from four different clinical isolates of Klebsiella pneumoniae, and (FIG. 35B) detection of carbapenem-resistance genes (part A) is normalized as a ratio of signal between the KPC and NDM-1 crRNA assays (n=2 technical replicates, two-tailed Student t-test; ****, p<0.0001; bars represent mean±s.e.m.).

[0074] FIGS. 36A-36C—provide a set of graphs demonstrating that (FIG. 36A) C2c2 is not sensitive to single mismatches, but can distinguish between single nucleotide differences in target when loaded with crRNAs with additional mismatches. ssRNA targets 1-3 were detected with 11 crRNAs, with 10 spacers containing synthetic mismatches at various positions in the crRNA. Mismatched spacers did not show reduced cleavage of target 1, but showed inhibited cleavage of mismatch targets 2 and 3 (SEQ ID NOS: 5 through 18). (FIG. 36B) Schematic showing the process for rational design of single-base specific spacers with synthetic mismatches. Synthetic mismatches are placed in proximity to the SNP or base of interest (SEQ ID NOS: 19 through 23). (FIG. 36C) Highly specific detection of strain SNPs allows for the differentiation of Zika African versus American RNA targets differing by only one nucleotide using C2c2 detection with truncated (23 nucleotide) crRNAs (n=2 technical replicates, one-tailed Student t-test; *, p<0.05; ****, p<0.0001; bars represent mean±s.e.m.).

[0075] FIGS. 37A-37D—provide a set of graphs demonstrating: (FIG. 37A) Schematic of Zika strain target regions and the crRNA sequences used for detection (SEQ ID NOS: 24 through 29). SNPs in the target are highlighted red or blue and synthetic mismatches in the guide sequence are colored red. (FIG. 37B) Highly specific detection of strain SNPs allows for the differentiation of Zika African versus American RNA targets using SHERLOCK (n=2 technical replicates, two-tailed Student t-test; ****, p<0.0001; bars represent mean±s.e.m.) (SEQ ID NOS: 30 through 35). (FIG. 37C) Schematic of Dengue strain target regions and the crRNA sequences used for detection. SNPs in the target are highlighted red or blue and synthetic mismatches in the guide sequence are colored red. (FIG. 37D) Highly specific detection of strain SNPs allows for the differentiation of Dengue strain 1 versus strain 3 RNA targets using SHERLOCK (n=2 technical replicates, two-tailed Student t-test; ****, p<0.0001; bars represent mean±s.e.m.).

[0076] FIGS. 38A-38D—provide a set of graphs showing (FIG. 38A) circos plot showing location of human SNPs detected with C2c2. (FIG. 38B) The assay conducted in accordance with certain example embodiments can distinguish between human SNPs. SHERLOCK can correctly genotype four different individuals at four different SNP sites in the human genome. The genotypes for each individual and identities of allele-sensing crRNAs are annotated below each plot (n=4 technical replicates; two-tailed Student t-test; *, p<0.05; **, p<0.01; ***, p<0.001; ****, p<0.0001; bars represent mean±s.e.m.). (FIG. 38C) A schematic of process for detection of cfDNA (such as cell free DNA detection of cancer mutations) in accordance with certain example embodiments. (FIG. 38D) Example crRNA sequences for detecting EGFR L858R and BRAF V600E. (SEQ ID NOS: 36 through 41). Sequences of two genomic loci assayed for cancer mutations in cell-free DNA. Shown are the target genomic sequence with the SNP highlighted in blue and the mutant/wildtype sensing crRNA sequences with synthetic mismatches colored in red.

[0077] FIGS. 39A, 39B—provide a set of graphs demonstrating that C2c2 can detect the mutant minor allele in mock cell-free DNA samples from the EGFR L858R (FIG. 39A) or the BRAF V600E (FIG. 39B) minor allele. (n=4 technical replicates, two tailed Student t-test; *, p<0.05; **, p<0.01, ****, P<0.0001; bars represent ±s.e.m.)

[0078] FIGS. 40A, 40B—provide a set of graphs demonstrating that (FIG. 40A) the assay can distinguish between genotypes at rs5082 (n=4 technical replicates; *, p<0.05; **, p<0.01; ***, p<0.001; ****, p<0.0001; bars represent mean±s.e.m.). (FIG. 40B) the assay can distinguish between genotypes at rs601338 in gDNA directly from centrifuged, denatured, and boiled saliva (n=3 technical replicates; *, p<0.05; bars represent mean±s.e.m.).

[0079] FIGS. 41A, 41B—provide (FIG. 41A) a schematic of an example embodiment performed on ssDNA 1 in the background of a target that differs from ssDNA 1 by only a single mismatch. (FIG. 41B) The assay achieves single nucleotide specificity detection of ssDNA 1 in the presence of mismatched background (target that differs by only a single mismatch from ssDNA). Various concentrations of target DNA were combined with a background excess of DNA with one mismatch and detected by the assay.

[0080] FIG. 42 is a graph showing a masking construct with a different dye Cy5 also allows for effective detection.

[0081] FIG. 43 is a schematic of a gold nanoparticle colorimetric based assay. AuNPs are aggregated using a combination of DNA linkers and an RNA bridge. Upon addition of RNase activity the ssRNA bridge is cleaved and the AuNPs are released, causing a characteristic color shift toward red.

[0082] FIG. 44 is a graph showing the ability to detect the shift in color of dispersed nanoparticles at 520 nm. The nanoparticles were based on the example embodiment shown in FIG. 43 and dispersed using addition of RNase A at varying concentrations.

[0083] FIG. 45 is a graph showing that the RNase colorimetric test is quantitative.

[0084] FIG. 46 is a picture of a microwell plate showing that the color shift in the dispersed nanoparticle is visually detectable.

[0085] FIG. 47 is a picture demonstrating that the colorimetric shift is visible on a paper substrate. The test was performed for 10 minutes at 37 degrees C. on glass fiber 934-AH.

[0086] FIGS. 48A, 48B are schematics of (FIG. 48A) a conformation switching aptamer in accordance with certain example embodiments for detection of protein or small molecules. The ligated product (FIG. 48B) is used as a complete target for the RNA-targeting effector, which cannot detect the unligated input product (SEQ ID NOS: 202 and 424).

[0087] FIG. 49 is an image of a gel showing that aptamer-based ligation can create RPA-detectable substrates. Aptamers were incubated with various levels of thrombin and then ligated with probe. Ligated constructs were used as templates for a 3 minute RPA reaction. 500 nM thrombin has significantly higher levels of amplified target than background.

[0088] FIG. 50 shows the amino acid sequence of the HEPN domains of selected C2c2 orthologues (SEQ ID NOS: 42-71, with SEQ ID NO:42 representing residues 586-603 for C2c2 of Leptotrichia shahii, SEQ ID NO:43 representing residues 586-603 for C2c2-5 of Leptotrichia bacterium, etc.).

[0089] FIG. 51 Cas13a detection of RNA with RPA amplification (SHERLOCK) can detect ssRNA target at concentrations down to −2 aM, more sensitive than Cas13a alone (n=4 technical replicates; bars represent mean±s.e.m.).

[0090] FIGS. 52A, 52B—Cas13a detection can be used to sense viral and bacterial pathogens. (FIG. 52A) Schematic of SHERLOCK detection of ZIKV RNA isolated from human clinical samples. (FIG. 52B) SHERLOCK is capable of highly sensitive detection of human ZIKV-positive serum (S) or urine (U) samples. Approximate concentrations of ZIKV RNA shown were determined by qPCR. (n=4 technical replicates, two-tailed Student t-test; ****, p<0.0001; bars represent mean±s.e.m.; n.d., not detected).

[0091] FIG. 53—Comparison of detection of ssRNA 1 by NASBA with primer set 2 (of FIG. 11) and SHERLOCK. (n=2 technical replicates; bars represent mean±s.e.m.)

[0092] FIGS. 54A-54C—Nucleic acid amplification with RPA and single-reaction SHERLOCK. (FIG. 54A) Digital-droplet PCR quantitation of ssRNA 1 for dilutions used in FIG. 1C. Adjusted concentrations for the dilutions based on the ddPCR results are shown above bar graphs. (FIG. 54B) Digital-droplet PCR quantitation of ssDNA 1 for dilutions used in FIG. 1D. Adjusted concentrations for the dilutions based on the ddPCR results are shown above bar graphs. (FIG. 54C) The RPA, T7 transcription, and Cas13a detection reactions are compatible and achieve single molecule detection of DNA 2 when incubated simultaneously (n=3 technical replicates, two-tailed Student t-test; n.s., not significant; **, p<0.01; ****, p<0.0001; bars represent mean±s.e.m.).

[0093] FIGS. 55A-55D—Comparison of SHERLOCK to other sensitive nucleic acid detection tools. (FIG. 55A) Detection analysis of ssDNA 1 dilution series with digital-droplet PCR (n=4 technical replicates, two-tailed Student t-test; n.s., not significant; *, p<0.05; **, p<0.01; ****, p<0.0001; red lines represent mean, bars represent mean±s.e.m. Samples with measured copy/μL below 10-1 not shown). (FIG. 55B) Detection analysis of ssDNA 1 dilution series with quantitative PCR (n=16 technical replicates, two-tailed Student t-test; n.s., not significant; **, p<0.01; ****, p<0.0001; red lines represent mean, bars represent mean±s.e.m. Samples with relative signal below 10-10 not shown). (FIG. 55C) Detection analysis of ssDNA 1 dilution series with RPA with SYBR Green II (n=4 technical replicates, two-tailed Student t-test; *, p<0.05; **, p<0.01; red lines represent mean, bars represent mean±s.e.m. Samples with relative signal below 100 not shown). (FIG. 55D) Detection analysis of ssDNA 1 dilution series with SHERLOCK (n=4 technical replicates, two-tailed Student t-test; **, p<0.01; ****, p<0.0001; red lines represent mean, bars represent mean±s.e.m. Samples with relative signal below 100 not shown). (FIG. 55E) Percent coefficient of variation for a series of ssDNA 1 dilutions for four types of detection methods. (FIG. 55F) Mean percent coefficient of variation for the 6e2, 6e1, 6e0, and 6e-1 ssDNA 1 dilutions for four types of detection methods (bars represent mean±s.e.m.).

[0094] FIG. 56—Detection of carbapanem resistance in clinical bacterial isolates. Detection of two different carbapenem-resistance genes (KPC and NDM-1) from five clinical isolates of Klebsiella pneumoniae and an E. coli control (n=4 technical replicates, two tailed Student t-test; ****, p<0.0001; bars represent mean±s.e.m.; n.d., not detected).

[0095] FIGS. 57A-57G—Characterization of LwCas13a sensitivity to truncated spacers and single mismatches in the target sequence. (FIG. 57A) Sequences of truncated spacer crRNAs (SEQ ID NOS: 72-83) used in (FIG. 57B-FIG. 57G). Also shown are sequences of ssRNA 1 and 2, which has a single base-pair difference highlighted in red. crRNAs containing synthetic mismatches are displayed with mismatch positions colored in red. (FIG. 57B) Collateral cleavage activity on ssRNA 1 and 2 for 28 nt spacer crRNA with synthetic mismatches at positions 1-7 (n=4 technical replicates; bars represent mean±s.e.m.). (FIG. 57C) Specificity ratios of crRNA tested in (FIG. 57B). Specificity ratios are calculated as the ratio of the on-target RNA (ssRNA 1) collateral cleavage to the off-target RNA (ssRNA 2) collateral cleavage. (n=4 technical replicates; bars represent mean±s.e.m.) (FIG. 57D) Collateral cleavage activity on ssRNA 1 and 2 for 23 nt spacer crRNA with synthetic mismatches at positions 1-7 (n=4 technical replicates; bars represent mean±s.e.m.). (FIG. 57E) Specificity ratios of crRNA tested in (FIG. 57D). Specificity ratios are calculated as the ratio of the on-target RNA (ssRNA 1) collateral cleavage to the off-target RNA (ssRNA 2) collateral cleavage (n=4 technical replicates; bars represent mean±s.e.m.). (FIG. 57F) Collateral cleavage activity on ssRNA 1 and 2 for 20 nt spacer crRNA with synthetic mismatches at positions 1-7 (n=4 technical replicates; bars represent mean±s.e.m.). (FIG. 57G) Specificity ratios of crRNA tested in (FIG. 57F). Specificity ratios are calculated as the ratio of the on-target RNA (ssRNA 1) collateral cleavage to the off-target RNA (ssRNA 2) collateral cleavage (n=4 technical replicates; bars represent mean±s.e.m.).

[0096] FIGS. 58A-58C—Identification of ideal synthetic mismatch position relative to mutations in the target sequence. (FIG. 58A) Sequences for evaluation of the ideal synthetic mismatch position to detect a mutation between ssRNA 1 and ssRNA (SEQ ID NOS: 84-115). On each of the targets, crRNAs with synthetic mismatches at the colored (red) locations are tested. Each set of synthetic mismatch crRNAs is designed such that the mutation location is shifted in position relative to the sequence of the spacer. Spacers are designed such that the mutation is evaluated at positions 3, 4, 5, and 6 within the spacer. (FIG. 58B) Collateral cleavage activity on ssRNA 1 and 2 for crRNAs with synthetic mismatches at varying positions. There are four sets of crRNAs with the mutation at either position 3, 4, 5, or 6 within the spacer:target duplex region (n=4 technical replicates; bars represent mean±s.e.m.). (FIG. 58C) Specificity ratios of crRNA tested in (FIG. 58B). Specificity ratios are calculated as the ratio of the on-target RNA (ssRNA 1) collateral cleavage to the off-target RNA (ssRNA 2) collateral cleavage (n=4 technical replicates; bars represent mean±s.e.m.).

[0097] FIG. 59—Genotyping with SHERLOCK at an additional locus and direct genotyping from boiled saliva. SHERLOCK can distinguish between genotypes at the rs601338 SNP site in genomic DNA directly from centrifuged, denatured, and boiled saliva (n=4 technical replicates, two-tailed Student t-test; **, p<0.01; ****, p<0.001; bars represent mean±s.e.m.).

[0098] FIGS. 60A-60E—Development of synthetic genotyping standards to accurately genotype human SNPs. (FIG. 60A) Genotyping with SHERLOCK at the rs601338 SNP site for each of the four individuals compared against PCR-amplified genotype standards (n=4 technical replicates; bars represent mean±s.e.m.). (FIG. 60B) Genotyping with SHERLOCK at the rs4363657 SNP site for each of the four individuals compared against PCR-amplified genotype standards (n=4 technical replicates; bars represent mean±s.e.m.). (FIG. 60C) Heatmaps of computed p-values between the SHERLOCK results for each individual and the synthetic standards at the rs601338 SNP site. A heatmap is shown for each of the allele-sensing crRNAs. The heatmap color map is scaled such that insignificance (p>0.05) is red and significance (p<0.05) is blue (n=4 technical replicates, one-way ANOVA). (FIG. 60D) Heatmaps of computed p-values between the SHERLOCK results for each individual and the synthetic standards at the rs4363657 SNP site. A heatmap is shown for each of the allele-sensing crRNAs. The heatmap color map is scaled such that insignificance (p>0.05) is red and significance (p<0.05) is blue (n=4 technical replicates, one-way ANOVA). (FIG. 60E) A guide for understanding the p-value heatmap results of SHERLOCK genotyping. Genotyping can easily be called by choosing the allele that corresponds to a p-value >0.05 between the individual and allelic synthetic standards. Red blocks correspond to non-significant differences between the synthetic standard and individual's SHERLOCK result and thus a genotype-positive result. Blue blocks correspond to significant differences between the synthetic standard and individual's SHERLOCK result and thus a genotype-negative result.

[0099] FIG. 61—Detection of ssDNA 1 as a small fraction of mismatched background target. SHERLOCK detection of a dilution series of ssDNA 1 on a background of human genomic DNA. Note that there should be no sequence similarity between the ssDNA 1 target being detected and the background genomic DNA (n=2 technical replicates; bars represent mean±s.e.m.).

[0100] FIGS. 62A, 62B—Urine (FIG. 62A) or serum (FIG. 62B) samples from patients with Zika virus were heat inactivated for 5 minutes at 95° C. (urine) or 65° C. (serum). One microliter of inactivated urine or serum was used as input for a 2 hr RPA reaction followed by a 3 hour C2c2/Cas13a detection reaction, in accordance with an example embodiment. Error bars indicate 1 SD based on n=4 technical replicates for the detection reaction.

[0101] FIGS. 63A, 63B—Urine samples from patients with Zika virus were heat-inactivated for 5 minutes at 95° C. One microliter of inactivated urine was used as input for a 30 minute RPA reaction followed by a 3 hour (FIG. 63A) or 1 hour (FIG. 63B) C2c2/Cas13 detection reaction, in accordance with example embodiments. Error bars indicate 1 SD based on n=4 technical replicates for the detection reaction.

[0102] FIG. 64—Urine samples from patients with Zika virus were heat-inactivated for 5 minutes at 95° C. One microliter of inactivated urine was used as input for a 20 minute RPA reaction followed by a 1 hour C2c2/Cas13a detection reaction. Healthy human urine was used as a negative control. Error bars indicate 1 SD based on n=4 technical replicates or the detection reaction.

[0103] FIGS. 65A, 65B—Urine samples from patients with Zika virus were heat-inactivated for 5 minutes at 95° C. One microliter of inactivated urine was used as input for a 20 minute RPA reaction followed by a 1 hour C2c2/Cas13a detection reaction in the presence or absence of guide RNA. Data are shown in two different graphs and are normalized by subtracting the average fluorescence values for no-guide detection reactions from the detection reactions containing guides. Healthy human urine was used as a negative control. Error bars indicate 1 SD based on n=4 technical replicates for the detection reaction.

[0104] FIG. 66—Shows detection of two malaria specific targets with four different guide RNA designs, in accordance with example embodiments (SEQ ID NOS: 116-127).

[0105] FIGS. 67A, 67B—Provides graphing showing editing preferences of different Cas13b orthologs. See Table 3 for key.

[0106] FIG. 68—provides A) a schematic of a multiplex assay using different Cas13b orthologs with different editing preferences, and B) data demonstrating the feasibility of such an assay using Cas13b10 and Cas13b5.

[0107] FIG. 69—provides graphs showing dual multiplexing with Cas13b5 (Prevotella sp. MA2106) and Cas13b9 (Prevotella intermedia) orthologues. Both effector proteins and guide sequences were contained in the same reaction allowing for dual multiplexing in the same reaction using different fluorescent readouts (poly U 530 nm and poly A 485 nm).

[0108] FIG. 70—provides same as FIG. 69 but in this instance using Cas13a (Leptorichia wadei LwaCas13a) orthologs and Cas13b orthologs (Prevotella sp. MA2016, Cas13b5).

[0109] FIG. 71—provides a method for tiling target sequences with multiple guide sequences in order to determine robustness of targeting, in accordance with certain example embodiments (SEQ ID NOS: 128 and 129).

[0110] FIG. 72—provides hybrid chain reaction (HCR) gels showing that Cas13 effector proteins may be used to unlock an initiator, for an example an initiator incorporated in a masking construct as described herein, to activate a hybridization chain reaction.

[0111] FIG. 73—provides data showing the ability to detect Pseudomonas aeruginosa in complex lysate.

[0112] FIG. 74—provides data showing ion preferences of certain Cas13 orthologues in accordance with certain example embodiments. All target concentrations were 20 nM input with ion concentrations of (1 mM and 10 mM).

[0113] FIG. 75—provides data showing that Cas13b12 has a 1 mM Zinc sulfate preference for cleavage.

[0114] FIG. 76—provides data showing buffer optimization may boost signal to noise of Cas13b5 on a polyA reporter. Old buffer comprises 40 mM Tris-HCL, 60 mM NaCl, 6 mM MgCl2, pH 7.3. New buffer comprises 20 mM HEPES pH 6.8, 6 mM MgCl2 and 60 mM NaCl.

[0115] FIG. 77—provides a schematic of type VI-A/C Crispr systems and Type VI-B1 and B2 systems as well as a phylogenetic tree of representative Cas13b orthologues.

[0116] FIG. 78—provides relative cleavage activity at different nucleotides of various Cas13b orthologs and relative to a LwCas13a.

[0117] FIG. 79—provides a graph show relative sensitivity of various example Cas13 orthologs.

[0118] FIG. 80—provides a graph showing the ability to achieve zepto molar (zM) levels of detection using an example embodiment.

[0119] FIGS. 81A-81D—provide schematics of a multiplex assay using Cas13 orthologs with different editing preferences and polyN based masking constructs.

[0120] FIGS. 82A-82F—provide data showing results of primer optimization experiments and detection of pseudomonas over a range of conditions.

[0121] FIGS. 83A-83H—illustrates the biochemical characterization of the Cas13b family of RNA-guided RNA-targeting enzymes and increased sensitivity and quantitative SHERLOCK. (FIG. 83A) Schematic of the CRISPR-Cas13 loci and crRNA structure. (FIG. 83B) A heatmap of the base preference of 15 Cas13b orthologs targeting ssRNA 1 with sensor probes consisting of a hexamer homopolymer of A, C, G, or U bases. (FIG. 83C) Schematic of cleavage motif preference discovery screen and preferred two-base motifs for LwaCas13a and PsmCas13b. Values represented in the heatmap are the counts of each two-base across all depleted motifs. Motifs are considered depleted if the −log 2(target/no target) value is above 1.0 in the LwaCas13a condition or 0.5 in the PsmCas13b condition. In the −log 2(target/no target) value, target and no target denote the frequency of a motif in the target and no target conditions, respectively. (FIG. 83D) Orthogonal base preferences of PsmCas13b and LwaCas13a targeting ssRNA 1 with either a U6 or A6 sensor probe. (FIG. 83E) Single molecule SHERLOCK detection with LwaCas13a and PsmCas13b targeting Dengue ssRNA target. (FIG. 83F) Single molecule SHERLOCK detection with LwaCas13a and PsmCas13b in large reaction volumes for increased sensitivity targeting ssRNA target 1. (FIG. 83G) Quantitation of P. aeruginosa synthetic DNA at various RPA primer concentrations. (FIG. 83H) Correlation of P. aeruginosa synthetic DNA concentration with detected fluorescence.

[0122] FIGS. 84A-84H—illustrates in-sample multiplexing SHERLOCK with orthogonal Cas13 enzymes. (FIG. 84A) Schematic of in-sample multiplexing using orthogonal Cas13 enzymes. (FIG. 84B) In-sample multiplexed detection of 20 nM Zika and Dengue synthetic RNA with LwaCas13a and PsmCas13b collateral activity. (FIG. 84C) In-sample multiplexed RPA and collateral detection at decreasing concentrations of S. aureus thermonuclease and P. aeruginosa acyltransferase synthetic targets with LwaCas13a and PsmCas13b. (FIG. 84D) Multiplexed genotyping with human samples at rs601338 with LwaCas13a and CcaCas13b. (FIG. 84E) Schematic of theranostic timeline for detection of disease alleles, correction with REPAIR, and assessment of REPAIR correction. (FIG. 84F) In-sample multiplexed detection of APC alleles from healthy- and disease-simulating samples with LwaCas13a and PsmCas13b. (FIG. 84G) Quantitation of REPAIR editing efficiency at the targeted APC mutation. (FIG. 84H) In-sample multiplexed detection of APC alleles from REPAIR targeting and non-targeting samples with LwaCas13a and PsmCas13b.

[0123] FIG. 85—provides a tree of 15 Cas13b orthologs purified and evaluated for in vitro collateral activity. Cas13b gene (blue), Csx27/Csx28 gene (red/yellow), and CRISPR array (grey) are shown.

[0124] FIGS. 86A-86C—illustrates protein purification of Cas13 orthologs. (FIG. 86A) Chromatograms of size exclusion chromatography for Cas13b, LwCas13a and LbaCas13a used in this study. Measured UV absorbance (mAU) is shown against the elution volume (ml). (FIG. 86B) SDS-PAGE gel of purified Cas13b orthologs. Fourteen Cas13b orthologs are loaded from left to right. A protein ladder is shown to the left. (FIG. 86C) Final SD S-PAGE gel of LbaCas13a dilutions (right) and BSA standard titration (left). Five dilutions of BSA and two of LbaCas13 are shown.

[0125] FIGS. 87A-87D—shows graphs illustrating base preference of Cas13b ortholog collateral cleavage. (FIG. 87A) Cleavage activity of fourteen Cas13b orthologs targeting ssRNA 1 using a homopolymer adenine sensor six nucleotides long. (FIG. 87B) Cleavage activity of fourteen Cas13b orthologs targeting ssRNA 1 using a homopolymer uridine sensor six nucleotides long. (FIG. 87C) Cleavage activity of fourteen Cas13b orthologs targeting ssRNA 1 using a homopolymer guanine sensor six nucleotides long. (FIG. 87D) Cleavage activity of fourteen Cas13b orthologs targeting ssRNA 1 using a homopolymer cytidine sensor six nucleotides long.

[0126] FIG. 88—shows size analysis of random motif-library after Cas13 collateral cleavage. Bioanalyzer traces for LwaCas13a-, PsmCas13b-, CcaCas13b-, and RNase A-treated library samples showing changes in library size after RNase activity. Cas13 orthologs are targeting Dengue ssRNA and cleave the random motif-library due to collateral cleavage. Marker standards are shown in the first lane.

[0127] FIGS. 89A-89D—shows a representation of various motifs after cleavage by RNases. (FIG. 89A) Box plots showing motif distribution of target to no-target ratios for LwaCas13a, PsmCas13b, CcaCas13b, and RNase A at 5 minute and 60 minute timepoints. RNase A ratios were compared to the average of the three Cas13 no-target conditions. Ratios are also an average of two cleavage reaction replicates. (FIG. 89B) Number of enriched motifs for LwaCas13a, PsmCas13b, CcaCas13b, and RNase A at the 60 minute timepoint. Enrichment motif was calculated as motifs above −log 2(target/no target) thresholds of either 1 (LwaCas13a, CcaCas13b, and RNase A) or 0.5 (PsmCas13b). A threshold of 1 corresponds to at least 50% depletion while a threshold of 0.5 corresponds to at least 30% depletion. (FIG. 89C) Sequence logos generated from enriched motifs for LwaCas13a, PsmCas13b, and CcaCas13b. LwaCas13a and CcaCas13b show a strong U preference as would be expected, while PsmCas13b shows a unique preference for A bases across the motif, which is consistent with homopolymer collateral activity preferences. (FIG. 89D) Heatmap showing the orthogonal motif preferences of LwaCas13a, PsmCas13b, and CcaCas13b. Values represented in the heatmap are the −log 2(target/no target) value of each shown motif. In the −log 2(target/no target) value, target and no target denote the frequency of a motif in the target and no target conditions, respectively.

[0128] FIGS. 90A-90C—shows single-base and two-base preferences of RNases determined by random motif library screen. (FIG. 90A) Heatmaps showing single base preferences for LwaCas13a, PsmCas13b, CcaCas13b, and RNase A at the 60 minute timepoint as determined by the random motif library cleavage screen. Values represented in the heatmap are the counts of each base across all depleted motifs. Motifs are considered depleted if the −log 2(target/no target) value is above 1.0 in the LwaCas13a, CcaCas13b, and RNase A conditions or 0.5 in the PsmCas13b condition. In the −log 2(target/no target) value, target and no target denote the frequency of a motif in the target and no target conditions, respectively. (FIG. 90B) Heatmaps showing two-base preference for CcaCas13b as determined by the random motif library cleavage screen. Values represented in the heatmap are the counts of each 2-base across all depleted motifs. Motifs are considered depleted if the −log 2(target/no target) value is above 1.0 in the LwaCas13a, CcaCas13b, and RNase A conditions or 0.5 in the PsmCas13b condition. In the −log 2(target/no target) value, target and no target denote the frequency of a motif in the target and no target conditions, respectively. (FIG. 90C) Heatmaps showing two-base preference for RNase A as determined by the random motif library cleavage screen. Values represented in the heatmap are the counts of each two-base across all depleted motifs. Motifs are considered depleted if the −log 2(target/no target) value is above 1.0 in the LwaCas13a, CcaCas13b, and RNase A conditions or 0.5 in the PsmCas13b condition. In the −log 2(target/no target) value, target and no target denote the frequency of a motif in the target and no target conditions, respectively.

[0129] FIG. 91—illustrates three-base preferences of RNases determined by random motif library screen. Heatmaps show three-base preferences for LwaCas13a, PsmCas13b, CcaCas13b, and RNase A at the 60 minute timepoint as determined by the random motif library cleavage screen. Values represented in the heatmap are the counts of each 3-base across all depleted motifs. Motifs are considered depleted if the −log 2(target/no target) value is above 1.0 in the LwaCas13a, CcaCas13b, and RNase A conditions or 0.5 in the PsmCas13b condition. In the −log 2(target/no target) value, target and no target denote the frequency of a motif in the target and no target conditions, respectively.

[0130] FIGS. 92A-92D—illustrate four-base preferences of RNases determined by random motif library screen. Heatmaps show four-base preferences for LwaCas13a, PsmCas13b, CcaCas13b, and RNase A at the 60 minute timepoint as determined by the random motif library cleavage screen. Values represented in the heatmap are the counts of each 4-base across all depleted motifs. Motifs are considered depleted if the −log 2(target/no target) value is above 1.0 in the LwaCas13a, CcaCas13b, and RNase A conditions or 0.5 in the PsmCas13b condition. In the −log 2(target/no target) value, target and no target denote the frequency of a motif in the target and no target conditions, respectively.

[0131] FIGS. 93A-93C—show results of testing base cleavage preferences of Cas13 orthologs with in vitro cleavage of poly-X substrates. (FIG. 93A) In vitro cleavage of poly-U, C, G, and A targets with LwaCas13a incubated with and without crRNA. (FIG. 93B) In vitro cleavage of poly-U, C, G, and A targets with CcaCas13b incubated with and without crRNA. (FIG. 93C) In vitro cleavage of poly-U, C, G, and A targets with PsmCas13b incubated with and without crRNA.

[0132] FIGS. 94A, 94B—shows results of buffer optimization of PsmCas13b cleavage activity. (FIG. 94A) A variety of buffers are tested for their effect on PsmCas13b collateral activity after targeting ssRNA 1. (FIG. 94B) The optimized buffer is compared to the original buffer at different PsmCas13b-crRNA complex concentrations.

[0133] FIGS. 95A-95F—illustrates ion preference of Cas13 orthologs for collateral cleavage. (FIG. 95A) Cleavage activity of PsmCas13b with a fluorescent poly U sensor for divalent cations Ca, Co, Cu, Mg, Mn, Ni, and Zn. PsmCas13b is incubated with a crRNA targeting a synthetic Dengue ssRNA. (FIG. 95B) Cleavage activity of PsmCas13b with a fluorescent poly A sensor for divalent cations Ca, Co, Cu, Mg, Mn, Ni, and Zn. PsmCas13b is incubated with a crRNA targeting a synthetic Dengue ssRNA. (FIG. 95C) Cleavage activity of Pin2Cas13b with a fluorescent poly U sensor for divalent cations Ca, Co, Cu, Mg, Mn, Ni, and Zn. Pin2Cas13b is incubated with a crRNA targeting a synthetic Dengue ssRNA. (FIG. 95D) Cleavage activity of Pin2Cas13b with a fluorescent poly A sensor for divalent cations Ca, Co, Cu, Mg, Mn, Ni, and Zn. Pin2Cas13b is incubated with a crRNA targeting a synthetic Dengue ssRNA. (FIG. 95E) Cleavage activity of CcaCas13b with a fluorescent poly U sensor for divalent cations Ca, Co, Cu, Mg, Mn, Ni, and Zn. CcaCas13b is incubated with a crRNA targeting a synthetic Dengue ssRNA. (FIG. 95F) Cleavage activity of CcaCas13b with a fluorescent poly A sensor for divalent cations Ca, Co, Cu, Mg, Mn, Ni, and Zn. CcaCas13b is incubated with a crRNA targeting a synthetic Dengue ssRNA.

[0134] FIGS. 96A, 96B—shows comparison of cleavage activity for Cas13 orthologs with adenine cleavage preference. (FIG. 96A) Cleavage activity of PsmCas13b and LbaCas13a incubated with respective crRNAs targeting a synthetic Zika target at different concentrations (n=4 technical replicates, two-tailed Student t-test; n.s., not significant; *, p<0.05; **, p<0.01; ***, p<0.001; ****, p<0.0001; bars represent mean±s.e.m.). (FIG. 96B) Cleavage activity of PsmCas13b and LbaCas13a incubated with respective crRNAs targeting a synthetic Dengue target at different concentrations (n=4 technical replicates, two-tailed Student t-test; n.s., not significant; *, p<0.05; **, p<0.01; ***, p<0.001; ****, p<0.0001; bars represent mean±s.e.m.).

[0135] FIGS. 97A, 97B—illustrate attomolar detection of Zika ssRNA target 4 with SHERLOCK with LwaCas13a and PsmCas13b. (FIG. 97A) SHERLOCK detection of Zika ssRNA at different concentrations with LwaCas13a and poly U sensor. (FIG. 97B) SHERLOCK detection of Zika ssRNA at different concentrations with PsmCas13b and poly A sensor.

[0136] FIG. 98—illustrates attomolar detection of Dengue ssRNA with SHERLOCK at different concentrations of CcaCas13b.

[0137] FIGS. 99A, 99B—testing Cas13 ortholog reprogrammability with crRNAs tiling ssRNA 1. (FIG. 99A) Cleavage activity of LwaCas13a and CcaCas13b with crRNAs tiled across ssRNA1. (FIG. 99B) Cleavage activity of PsmCas13b with crRNAs tiled across ssRNA1.

[0138] FIGS. 100A, 100B—show the effect of crRNA spacer length on Cas13 ortholog cleavage. (FIG. 100A) Cleavage activity of PsmCas13b with ssRNA1-targeting crRNAs of varying spacer lengths. (FIG. 100B) Cleavage activity of CcaCas13b with ssRNA1-targeting crRNAs of varying spacer lengths.

[0139] FIGS. 101A-101G—illustrate optimizing primer concentration for quantitative SHERLOCK. (FIG. 101A) SHERLOCK kinetic curves of LwaCas13a incubated with Zika RNA targets of different concentration and a complementary crRNA at an RPA primer concentration of 480 nM. (FIG. 101B) SHERLOCK kinetic curves of LwaCas13a incubated with Zika RNA targets of different concentration and a complementary crRNA at an RPA primer concentration of 240 nM. (FIG. 101C) SHERLOCK kinetic curves of LwaCas13a incubated with Zika RNA targets of different concentration and a complementary crRNA at an RPA primer concentration of 120 nM. (FIG. 101D) SHERLOCK kinetic curves of LwaCas13a incubated with Zika RNA targets of different concentration and a complementary crRNA at an RPA primer concentration of 24 nM. (FIG. 101E) SHERLOCK detection of Zika RNA of different concentrations with four different RPA primer concentrations: 480 nM, 240 nM, 120 nM, 60 nM, and 24 nM. (FIG. 101F) The mean R2 correlation between background subtracted fluorescence of SHERLOCK and the Zika target RNA concentration at different RPA primer concentrations. (FIG. 101G) Quantitative SHERLOCK detection of Zika RNA targets at different concentrations in a 10-fold dilution series (black points) and 2-fold dilution series (red points). An RPA primer concentration of 120 nM was used.

[0140] FIGS. 102A-102C—illustrate multiplexed detection of Zika and Dengue targets. (FIG. 102A) Multiplexed two-color detection using LwaCas13a targeting a Zika ssRNA target and PsmCas13b targeting a Dengue ssRNA target. Both targets are at 20 nM input. All Data shown represent 180 minutes time point of reaction. (FIG. 102B) Multiplexed two-color detection using LwaCas13a targeting a Zika ssRNA target and PsmCas13b targeting a Dengue ssRNA target. Both targets are at 200 pM input. (FIG. 102C) In-sample multiplexed detection of 20 pM Zika and Dengue synthetic RNA with CcaCas13a and PsmCas13b collateral activity.

[0141] FIGS. 103A, 103B—illustrate in-sample multiplexed RNA detection of Zika and Dengue ssRNA. In-sample multiplexed RPA and collateral detection at decreasing concentrations of Zika and Dengue synthetic targets with PsmCas13b and CcaCas13b.

[0142] FIGS. 104A, 104B—illustrate non-multiplexed theranostic detection of mutations and REPAIR editing. (FIG. 104A) Detection of APC alleles from healthy- and disease-simulated samples with LwaCas13a. (FIG. 104B) Detection with LwaCas13a of editing correction at the APC alleles from REPAIR targeting and non-targeting samples.

[0143] FIGS. 105A-105E—illustrate colorimetric detection of RNase activity with gold nanoparticle aggregation. (FIG. 105A) Schematic of gold-nanoparticle based colorimetric readout for RNase activity. In the absence of RNase activity, RNA linkers aggregate gold nanoparticles, leading to loss of red color. Cleavage of RNA linkers releases nanoparticles and results in a red color change. (FIG. 105B) Image of colorimetric reporters after 120 minutes of RNase digestion at various units of RNase A. (FIG. 105C) Kinetics at 520 nm absorbance of AuNP colorimetric reporters with digestion at various unit concentrations of RNase A. (FIG. 105D) The 520 nm absorbance of AuNP colorimetric reporters after 120 minutes of digestion at various unit concentrations of RNase A. (FIG. 105E) Time to half-A520 maximum of AuNP colorimetric reporters with digestion at various unit concentrations of RNase A.

[0144] FIGS. 106A-106C—illustrates quantitative detection of CP4-EPSPS gene from soybean genomic DNA. (FIG. 106A) The mean correlation R2 of the SHERLOCK background subtracted fluorescence and CP4-EPSPS bean percentage at different time points of detection. Bean percentage depicts the amount of round-up ready beans in a mixture of round-up ready and wild-type beans. The CP4-EPSPS gene is only present in round-up ready beans. (FIG. 106B) SHERLOCK detection of CP4-EPSPS resistance gene at different bean percentages showing the quantitative nature of SHERLOCK detection at 30 minutes of incubation. (FIG. 106C) SHERLOCK detection of Lectin gene at different bean percentages. Bean percentage depicts the amount of round-up ready beans in a mixture of round-up ready and wild-type beans. The Lectin gene is present in both types of beans and therefore shows no correlation to round-up ready bean percentage.

[0145] FIG. 107—illustrates ability of Cpf1, with RPA, to detect down to 2 aM DNA. RPA amplifies DNA which is directly detected by AsCpf1 without the need for a further T7 transcription step.

[0146] FIG. 108—illustrates three-color, multiplexing enabled with Cpf1 due to its orthogonal cleavage. Cpf1 detects dsDNA 1 in HEX channel. PsmCas13b (b5) detected Dengue ssRNA in the FAM channel. LwaCas13a detects Zika ssRNA in the Cy5 channel.

[0147] FIG. 109—illustrates a significance test done a three-color multiplex for every condition against the water/water/water control.

[0148] FIG. 110—illustrates aptamer color generation.

[0149] FIG. 111—illustrates aptamer design and concentration optimization (SEQ ID NOS:130 and 131).

[0150] FIG. 112—illustrates absorbance data for colorimetric detection.

[0151] FIG. 113—illustrates the stability of the colorimetric change.

[0152] FIG. 114—illustrates comparison of colorimetric detection to fluorescence detection of Zika ssRNA.

[0153] FIG. 115—illustrates an embodiment of the invention with Cpf1 as the nickase.

[0154] FIG. 116—illustrates in-sample multiplexing with ortholog base preferences.

[0155] FIG. 117—illustrates in-sample 3-plex with ortholog base single-base preferences and AsCpf1.

[0156] FIG. 118—illustrates in-sample 4-plex with ortholog base double-base preferences and AsCpf1.

[0157] FIGS. 119A-119F—illustrate base preference of Cas13 ortholog collateral cleavage. (FIG. 119A) Schematic of assay for determining hompolymer preferences of Cas13a/b enzymes. (FIG. 119B) Heatmap of the base preference of 15 Cas13b orthologs targeting ssRNA 1 with reporters consisting of a homopolymer of A, C, G, or U bases. (FIG. 119C) Cleavage activity of fourteen Cas13b orthologs targeting ssRNA 1 using a homopolymer adenine sensor five nucleotides long. (FIG. 119D) Cleavage activity of fourteen Cas13b orthologs targeting ssRNA 1 using a homopolymer uridine sensor five nucleotides long. (FIG. 119E) Cleavage activity of fourteen Cas13b orthologs targeting ssRNA 1 using a homopolymer guanine sensor five nucleotides long. (FIG. 119F) Cleavage activity of fourteen Cas13b orthologs targeting ssRNA 1 using a homopolymer cytidine sensor five nucleotides long.

[0158] FIGS. 120A, 120B—buffer optimization of PsmCas13b cleavage activity. (FIG. 120A) A variety of buffers are tested for their effect on PsmCas13b collateral activity after targeting ssRNA 1. (FIG. 120B) The optimized buffer is compared to the original buffer at different PsmCas13bcrRNA complex concentrations.

[0159] FIGS. 121A-121F—ion preference of Cas13 orthologs for collateral cleavage. (FIG. 121A) Cleavage activity of PsmCas13b with a fluorescent poly U sensor for divalent cations Ca, Co, Cu, Mg, Mn, Ni, and Zn. PsmCas13b is incubated with a crRNA targeting a synthetic ssRNA 1. (FIG. 121B) Cleavage activity of PsmCas13b with a fluorescent poly A sensor for divalent cations Ca, Co, Cu, Mg, Mn, Ni, and Zn. PsmCas13b is incubated with a crRNA targeting a synthetic ssRNA 1. (FIG. 121C) Cleavage activity of Pin2Cas13b with a fluorescent poly U sensor for divalent cations Ca, Co, Cu, Mg, Mn, Ni, and Zn. Pin2Cas13b is incubated with a crRNA targeting a synthetic ssRNA 1. (FIG. 121D) Cleavage activity of Pin2Cas13b with a fluorescent poly A sensor for divalent cations Ca, Co, Cu, Mg, Mn, Ni, and Zn. Pin2Cas13b is incubated with a crRNA targeting a synthetic ssRNA 1. (FIG. 121E) Cleavage activity of CcaCas13b with a fluorescent poly U sensor for divalent cations Ca, Co, Cu, Mg, Mn, Ni, and Zn. CcaCas13b is incubated with a crRNA targeting a synthetic ssRNA 1. (FIG. 121F) Cleavage activity of CcaCas13b with a fluorescent poly A sensor for divalent cations Ca, Co, Cu, Mg, Mn, Ni, and Zn. CcaCas13b is incubated with a crRNA targeting a synthetic ssRNA 1.

[0160] FIGS. 122A-122C—Testing Cas13 Ortholog Reprogrammability with crRNAs Tiling ssRNA 1. (FIG. 122A) Schematic of locations tiled crRNA targeting ssRNA 1 (SEQ ID NO:132). (FIG. 122B) Cleavage activity of LwaCas13a and CcaCas13b with crRNAs tiled across ssRNA1. (FIG. 122C) Cleavage activity of PsmCas13b with crRNAs tiled across ssRNA1.

[0161] FIGS. 123A, 123B—Effect of crRNA Spacer Length on Cas13 Ortholog Cleavage. (FIG. 123A) Cleavage activity of PsmCas13b with ssRNA1-targeting crRNAs of varying spacer lengths. (FIG. 123B) Cleavage activity of CcaCas13b with ssRNA1-targeting crRNAs of varying spacer lengths.

[0162] FIGS. 124A, 124B—Comparison of cleavage activity for Cas13 orthologs with adenine cleavage preference. (FIG. 124A) Cleavage activity of PsmCas13b and LbaCas13a incubated with respective crRNAs targeting the ZIKV ssRNA target at different concentrations (n=4 technical replicates, two-tailed Student t-test; n.s., not significant; *, p<0.05; **, p<0.01; ***, p<0.001; ****, p<0.0001; bars represent mean±s.e.m.). (FIG. 124B) Cleavage activity of PsmCas13b and LbaCas13a incubated with respective crRNAs targeting a synthetic DENV ssRNA target at different concentrations (n=4 technical replicates, two-tailed Student t-test; n.s., not significant; *, p<0.05; **, p<0.01; ***, p<0.001; ****, p<0.0001; bars represent mean±s.e.m.).

[0163] FIGS. 125A-125H—Multiplexed SHERLOCK detection with orthogonal collateral activity of Class 2 enzymes. (FIG. 125A) Schematic of assay for determining di-nucleotide preferences of Cas13a/b enzymes. (FIG. 125B) Collateral activity of LwaCas13a, CcaCas13b, LbaCas13a, and PsmCas13b on orthogonal di-nucleotide reporters. (FIG. 125C) Schematic of collateral activity of Cas12a activated by dsDNA. (FIG. 125D) Comparison of collateral activity and pre-amplification enhanced collateral activity (SHERLOCK) of LwaCas13a, PsmCas13b, and AsCas12a. The dotted line denotes 2e9 (aM), the limit of AsCas12a sensitivity without preamplification. Values represent mean+/−S.E.M. (FIG. 125E) Schematic of in-sample 4 channel multiplexing using orthogonal Cas13 and Cas12a enzymes. (FIG. 125F) In-sample multiplexed detection of ZIKV ssRNA, ssRNA 1, DENV ssRNA, and dsDNA 1 with LwaCas13a, PsmCas13b, CcaCas13b, and AsCas12a. (FIG. 125G) Schematic of in-sample multiplexed detection of S. aureus thermonuclease and P. aeruoginosa acyltransferase synthetic targets with LwaCas13a and PsmCas13b. (FIG. 125H) In-sample multiplexed RPA and collateral detection at decreasing concentrations of S. aureus thermonuclease and P. aeruoginosa acyltransferase synthetic targets with LwaCas13a and PsmCas13b.

[0164] FIGS. 126A-126D—Di-nucleotide preferences of Cas13a/b enzymes. (FIG. 126A) Heatmap of the di-nucleotide base preference of 10 Cas13a/b orthologs targeting ssRNA 1, unless otherwise indicated, with reporters consisting of a di-nucleotide of A, C, G, or U RNA bases. (*) represent non-background subtracted orthologs with high background activity. (FIG. 126B) Heatmap of the di-nucleotide base preference of the high background activity orthologs LbuCas13a and PinCas13b tested on indicated targets. (FIG. 126C) Cleavage activity of LbuCas13a on AU di-nucleotide motif with and without 20 nM DENV ssRNA target tested with varying spacer lengths. (FIG. 126D) Cleavage activity of LbuCas13a on UG di-nucleotide motif with and without 20 nM DENV ssRNA target tested with varying spacer lengths.

[0165] FIGS. 127A-127C—Relationship of Cas13 families with di-nucleotide cleavage preferences. (FIG. 127A) Protein sequence similarity matrix based on multiple protein sequence alignment of several Cas13a and Cas13b ortholog members. Clustering is shown based on Euclidean distance. (FIG. 127B) Direct repeat sequence similarity matrix based on multiple sequence alignment of several Cas13a and Cas13b direct repeat sequences. Clustering is shown based on Euclidean distance. (FIG. 127C) Clustering of the Cas13 cleavage activity base preferences of dinucleotide motif reporters.

[0166] FIGS. 128A, 128B—Kinetics of cleavage activity for Cas13 enzymes with orthogonal cleavage preferences. (FIG. 128A) Orthogonal base preferences of PsmCas13b and LwaCas13a targeting ssRNA 1 with either a U6 or A6 reporter. (FIG. 128B) Orthogonal base preferences of CcaCas13b and LwaCas13a targeting DENV RNA with either a AU or UC reporter.

[0167] FIGS. 129A-129E—Random motif cleavage screen for testing Cas13 base preferences. (FIG. 129A) Schematic of cleavage motif preference discovery screen for comparing random motif prefences. (FIG. 129B) Bioanalyzer traces for LwaCas13a-, PsmCas13b-, CcaCas13b-, and RNase A treated library samples showing changes in library size after RNase activity. Cas13 orthologs are targeting DENV ssRNA and cleave the random motif-library due to collateral cleavage. Marker standards are shown in the first lane. (FIG. 129C) Box plots showing motif distribution of target to no-target ratios for LwaCas13a, PsmCas13b, CcaCas13b, and RNase A at 5 minute and 60 minute timepoints. RNase A ratios were compared to the average of the three Cas13 no-target conditions. Ratios are also an average of two cleavage reaction replicates. (FIG. 129D) Number of enriched motifs for LwaCas13a, PsmCas13b, CcaCas13b, and RNase A at the 60 minute timepoint. Enrichment motif was calculated as motifs above −log 2(target/no target) thresholds of either 1 (LwaCas13a, CcaCas13b, and RNase A) or 0.5 (PsmCas13b). A threshold of 1 corresponds to at least 50% depletion while a threshold of 0.5 corresponds to at least 30% depletion. (FIG. 129E) Preferred two-base motifs for LwaCas13a and PsmCas13b. Values represented in the heatmap are the counts of each two-base across all depleted motifs. Motifs are considered depleted if the −log 2(target/no target) value is above 1.0 in the LwaCas13a condition or 0.5 in the PsmCas13b condition. In the −log 2(target/no target) value, target and no target denote the frequency of a motif in the target and no target conditions, respectively.

[0168] FIGS. 130A-130C—Motifs and orthogonal sequences from random motif cleavage screen. (FIG. 130A) Sequence logos generated from enriched motifs for LwaCas13a, PsmCas13b, and CcaCas13b. LwaCas13a and CcaCas13b show a strong U preference as would be expected, while PsmCas13b shows a unique preference for A bases across the motif, which is consistent with homopolymer collateral activity preferences. (FIG. 130B) Collateral activity of LwaCas13a and CcaCas13b targeting DENV ssRNA on most depleted motifs from the RNA collateral motif screen. (FIG. 130C) Collateral activity of PsmCas13b targeting DENV ssRNA on most depleted motifs from the RNA collateral motif screen.

[0169] FIGS. 131A-131C—Comparison of top collateral activity motifs from the RNA motif collateral activity screens. (FIG. 131A) Heatmap showing the orthogonal motif preferences of LwaCas13a, PsmCas13b, and CcaCas13b. Values represented in the heatmap are the −log 2(target/no target) value of each shown motif. In the −log 2(target/no target) value, target and no target denote the frequency of a motif in the target and no target conditions, respectively. (FIG. 131B) Cleavage activity of LwaCas13a and CcaCas13b on top orthogonal motifs derived from the motif preference discovery screen (FIG. 131C) Collateral activity of LwaCas13a and CcaCas13b targeting DENV ssRNA on top orthogonal RNA motifs.

[0170] FIGS. 132A-132D—Comparison of random motif library screen on different targets and enzymes. (FIG. 132A) Pair-wise comparison of enrichment scores for different activating targets with LwaCas13a. (FIG. 132B) Heatmaps showing two-base preference for LwaCas13a with the ZIKV ssRNA target as determined by the random motif library cleavage screen. Values represented in the heatmap are the counts of each 2-base across all depleted motifs. Motifs are considered depleted if the −log 2(target/no target) value is above 1.0. (FIG. 132C) Heatmaps showing two-base preference for LwaCas13a with the DENV ssRNA target as determined by the random motif library cleavage screen. Values represented in the heatmap are the counts of each 2-base across all depleted motifs. Motifs are considered depleted if the −log 2(target/no target) value is above 1.0. (FIG. 132D) Heatmaps showing two-base preference for LwaCas13a with the ssRNA1 target as determined by the random motif library cleavage screen. Values represented in the heatmap are the counts of each 2-base across all depleted motifs. Motifs are considered depleted if the −log 2(target/no target) value is above 1.0.

[0171] FIGS. 133A, 133B—Multiplexed detection of ZIKV ssRNA and DENV ssRNA targets. (FIG. 133A) In-sample multiplexed detection of 20 nM ZIKV and DENV ssRNA targets with LwaCas13a and PsmCas13b collateral activity. (FIG. 133B) In-sample multiplexed detection of 20 pM ZIKV and DENV ssRNA targets with CcaCas13a and PsmCas13b collateral activity.

[0172] FIG. 134—Attomolar detection of CcaCas13b-SHERLOCK. Comparison of collateral activity and pre-amplification enhanced collateral (SHERLOCK) of CcaCas13b.

[0173] FIGS. 135A, 135B—Triplex detection using orthogonal CRISPR enzymes. (FIG. 135A) Schematic of in-sample 3 channel multiplexing using orthogonal Cas13 and Cas12a enzymes. (FIG. 135B) In-sample multiplexed detection of ZIKV ssRNA, DENV ssRNA, and dsDNA 1 with LwaCas13a, PsmCas13b, and Cas12a.

[0174] FIGS. 136A-136D—In-sample multiplexed RNA detection of ZIKV ssRNA and DENV ssRNA targets and human genotyping. (FIG. 136A) In-sample multiplexed RPA and collateral detection at decreasing concentrations of ZIKV and DENV ssRNA targets with PsmCas13b. (FIG. 136B) In-sample multiplexed RPA and collateral detection at decreasing concentrations of ZIKV and DENV ssRNA targets with LwaCas13a. (FIG. 136C) Schematic of crRNA design and target sequences for multiplexed genotyping at rs601338 with LwaCas13a and PsmCas13b (SEQ ID NO:134-137). (FIG. 136D) Multiplexed genotyping with human samples at rs601338 with LwaCas13a and PsmCas13b.

[0175] FIGS. 137A-137G—Single molecule quantitation and enhanced signal with SHERLOCK and Csm6 (FIG. 137A) Schematic of DNA reaction scheme for quantitation of P. aeroginosa synthetic DNA. (FIG. 137B) Quantitation of P. aeroginosa synthetic DNA at various RPA primer concentrations. Values represent mean+/−S.E.M. (FIG. 137C) Correlation of P. aeroginosa synthetic DNA concentration with detected fluorescence. Values represent mean+/−S.E.M. (FIG. 137D) Schematic of independent readout of LwaCas13a and Csm6 cleavage activity with orthogonal reporters. (FIG. 137E) Activation of EiCsm6 by LwaCas13a cleavage of adenine-uridine 332 activators with different length adenine tracts. LwaCas13a is targeting synthetic DENV ssRNA. Values represent mean+/−S.E.M. (FIG. 137F) Combined LwaCas13a and EiCsm6 signal for increasing concentrations of (A)6-(U)5 activator detecting 20 nM of DENV ssRNA. Values represent mean+/−S.E.M. (FIG. 137G) Kinetics of EiCsm6-enhanced LwaCas13a SHERLOCK detection of P. aeruoginosa acyltransferase synthetic target.

[0176] FIGS. 138A-138G—Optimizing primer concentration for quantitative SHERLOCK. (FIG. 138A) SHERLOCK kinetic curves of LwaCas13a incubated with ZIKV ssRNA targets of different concentration and a complementary crRNA at an RPA primer concentration of 480 nM. (FIG. 138B) SHERLOCK kinetic curves of LwaCas13a incubated with ZIKV ssRNA targets of different concentration and a complementary crRNA at an RPA primer concentration of 240 nM. (FIG. 138C) SHERLOCK kinetic curves of LwaCas13a incubated with ZIKV ssRNA targets of different concentration and a complementary crRNA at an RPA primer concentration of 120 nM. (FIG. 138D) SHERLOCK kinetic curves of LwaCas13a incubated with ZIKV ssRNA targets of different concentration and a complementary crRNA at an RPA primer concentration of 24 nM. (FIG. 138E) SHERLOCK detection of ZIKV ssRNA of different concentrations at with four different RPA primer concentrations: 480 nM, 240 nM, 120 nM, 60 nM, and 24 nM. (FIG. 138F) The mean R2 correlation between background subtracted fluorescence of SHERLOCK and the ZIKV ssRNA target RNA concentration at different RPA primer concentrations. (FIG. 138G) Quantitative SHERLOCK detection of ZIKV ssRNA targets at different concentrations in a 10-fold dilution series (black points) and 2-fold dilution series (red points). An RPA primer concentration of 240 nM was used.

[0177] FIGS. 139A-139C—Large volume SHERLOCK reactions with sub-attomolar sensitivity (FIG. 139A) Schematic of large reactions for increased sensitivity single molecule detection. (FIG. 139B) Single molecule SHERLOCK detection with LwaCas13a in large reaction volumes for increased sensitivity targeting ssRNA target 1. For 250 μL reaction volumes, 100 μL of sample input is used and for 1000 μL reaction volumes, 540 μL of sample input is used. (FIG. 139C) Single molecule SHERLOCK detection with PsmCas13b in large reaction volumes for increased sensitivity targeting ssRNA target 1. For 250 μL reaction volumes, 100 μL of sample input is used.

[0178] FIGS. 140A-140F—Combined therapeutics 363 and diagnostics with Cas13 enzymes. (FIG. 140A) Schematic of timeline for detection of disease alleles, correction with REPAIR, and assessment of REPAIR correction. (FIG. 140B) Sequences of targets and crRNA designs used for detection of APC alleles (SEQ ID NO:138-141). (FIG. 140C) Sequences of target and REPAIR guide design used for correction of APC alleles (SEQ ID NO:142 and 143). (FIG. 140D) In-sample multiplexed detection of APC alleles from healthy- and disease-simulating samples with LwaCas13a and PsmCas13b. Adjusted crRNA ratio allows for comparisons between different crRNAs that will have different overall signal levels (see methods for more details). Values represent mean+/−S.E.M. (FIG. 140E) Quantitation of REPAIR editing efficiency at the targeted APC mutation. Values represent mean+/−S.E.M. (FIG. 140F) In-sample multiplexed detection of APC alleles from REPAIR targeting and non-targeting samples with LwaCas13a and PsmCas13b. Values represent mean+/−S.E.M.

[0179] FIGS. 141A, 141B—Non-multiplexed theranostic detection of mutations and REPAIR editing. (FIG. 141A) Detection of APC alleles from healthy- and disease-simulated samples with LwaCas13a. (FIG. 141B) Detection with LwaCas13a of editing correction at the APC alleles from REPAIR targeting and non-targeting samples.

[0180] FIGS. 142A and 142B—Show results of lateral flow assay for Dengue RNA and ssRNA1 using a Cas13b10 probe for Dengue and a LwaCas13a probe for ssRNA1.

### DETAILED DESCRIPTION OF THE EXAMPLE EMBODIMENTS

### General Definitions

[0181] Unless defined otherwise, technical and scientific terms used herein have the same meaning as commonly understood by one of ordinary skill in the art to which this disclosure pertains. Definitions of common terms and techniques in molecular biology may be found in Molecular Cloning: A Laboratory Manual, 2nd edition (1989) (Sambrook, Fritsch, and Maniatis); Molecular Cloning: A Laboratory Manual, 4th edition (2012) (Green and Sambrook); Current Protocols in Molecular Biology (1987) (F. M. Ausubel et al. eds.); the series Methods in Enzymology (Academic Press, Inc.): PCR 2: A Practical Approach (1995) (M. J. MacPherson, B. D. Hames, and G. R. Taylor eds.): Antibodies, A Laboratory Manual (1988) (Harlow and Lane, eds.): Antibodies A Laboratory Manual, 2nd edition 2013 (E. A. Greenfield ed.); Animal Cell Culture (1987) (R.I. Freshney, ed.); Benjamin Lewin, Genes IX, published by Jones and Bartlet, 2008 (ISBN 0763752223); Kendrew et al. (eds.), The Encyclopedia of Molecular Biology, published by Blackwell Science Ltd., 1994 (ISBN 0632021829); Robert A. Meyers (ed.), Molecular Biology and Biotechnology: a Comprehensive Desk Reference, published by VCH Publishers, Inc., 1995 (ISBN 9780471185710); Singleton et al., Dictionary of Microbiology and Molecular Biology 2nd ed., J. Wiley & Sons (New York, N.Y. 1994), March, Advanced Organic Chemistry Reactions, Mechanisms and Structure 4th ed., John Wiley & Sons (New York, N.Y. 1992); and Marten H. Hofker and Jan van Deursen, Transgenic Mouse Methods and Protocols, 2nd edition (2011)

[0182] As used herein, the singular forms “a”, “an”, and “the” include both singular and plural referents unless the context clearly dictates otherwise.

[0183] The term “optional” or “optionally” means that the subsequent described event, circumstance or substituent may or may not occur, and that the description includes instances where the event or circumstance occurs and instances where it does not.

[0184] The recitation of numerical ranges by endpoints includes all numbers and fractions subsumed within the respective ranges, as well as the recited endpoints.

[0185] The terms “about” or “approximately” as used herein when referring to a measurable value such as a parameter, an amount, a temporal duration, and the like, are meant to encompass variations of and from the specified value, such as variations of +/−10% or less, +/−5% or less, +/−1% or less, and +/−0.1% or less of and from the specified value, insofar such variations are appropriate to perform in the disclosed invention. It is to be understood that the value to which the modifier “about” or “approximately” refers is itself also specifically, and preferably, disclosed.

[0186] Reference throughout this specification to “one embodiment”, “an embodiment,” “an example embodiment,” means that a particular feature, structure or characteristic described in connection with the embodiment is included in at least one embodiment of the present invention. Thus, appearances of the phrases “in one embodiment,” “in an embodiment,” or “an example embodiment” in various places throughout this specification are not necessarily all referring to the same embodiment, but may. Furthermore, the particular features, structures or characteristics may be combined in any suitable manner, as would be apparent to a person skilled in the art from this disclosure, in one or more embodiments. Furthermore, while some embodiments described herein include some but not other features included in other embodiments, combinations of features of different embodiments are meant to be within the scope of the invention. For example, in the appended claims, any of the claimed embodiments can be used in any combination.

[0187] “C2c2” is now referred to as “Cas13a”, and the terms are used interchangeably herein unless indicated otherwise.

[0188] All publications, published patent documents, and patent applications cited herein are hereby incorporated by reference to the same extent as though each individual publication, published patent document, or patent application was specifically and individually indicated as being incorporated by reference.

### Overview

[0189] Microbial Clustered Regularly Interspaced Short Palindromic Repeats (CRISPR) and CRISPR-associated (CRISPR-Cas) adaptive immune systems contain programmable endonucleases, such as Cas9 and Cpf1 (Shmakov et al., 2017; Zetsche et al., 2015). Although both Cas9 and Cpf1 target DNA, single effector RNA-guided RNases have been recently discovered (Shmakov et al., 2015) and characterized (Abudayyeh et al., 2016; Smargon et al., 2017), including C2c2, providing a platform for specific RNA sensing. RNA-guided RNases can be easily and conveniently reprogrammed using CRISPR RNA (crRNAs) to cleave target RNAs. Unlike the DNA endonucleases Cas9 and Cpf1, which cleave only its DNA target, RNA-guided RNases, like Cas13a and Cpf1, remains active after cleaving its RNA or DNA target, leading to “collateral” cleavage of non-targeted RNAs in proximity (Abudayyeh et al., 2016). This crRNA-programmed collateral RNA cleavage activity presents the opportunity to use RNA-guided RNases to detect the presence of a specific RNA by triggering in vivo programmed cell death or in vitro nonspecific RNA degradation that can serve as a readout (Abudayyeh et al., 2016; East-Seletsky et al., 2016).

[0190] The embodiments disclosed herein utilized RNA targeting effectors to provide a robust CRISPR-based diagnostic with attomolar sensitivity. Embodiments disclosed herein can detect broth DNA and RNA with comparable levels of sensitivity and can differentiate targets from non-targets based on single base pair differences. Moreover, the embodiments disclosed herein can be prepared in freeze-dried format for convenient distribution and point-of-care (POC) applications. Such embodiments are useful in multiple scenarios in human health including, for example, viral detection, bacterial strain typing, sensitive genotyping, and detection of disease-associated cell free DNA. For ease of reference, the embodiments disclosed herein may also be referred to as SHERLOCK (Specific High-sensitivity Enzymatic Reporter unLOCKing).

[0191] In one aspect, the embodiments disclosed herein are directed to a nucleic acid detection system comprising two or more CRISPR systems one or more guide RNAs designed to bind to corresponding target molecules, a masking construct, and optional amplification reagents to amplify target nucleic acid molecules in a sample. In certain example embodiments, the system may further comprise one or more detection aptamers. The one or more detection aptamers may comprise a RNA polymerase site or primer binding site. The one or more detection aptamers specifically bind one or more target polypeptides and are configured such that the RNA polymerase site or primer binding site is exposed only upon binding of the detection aptamer to a target peptide. Exposure of the RNA polymerase site facilitates generation of a trigger RNA oligonucleotide using the aptamer sequence as a template. Accordingly, in such embodiments the one or more guide RNAs are configured to bind to a trigger RNA.

[0192] In another aspect, the embodiments disclosed herein are directed to a diagnostic device comprising a plurality of individual discrete volumes. Each individual discrete volume comprises a CRISPR effector protein, one or more guide RNAs designed to bind to a corresponding target molecule, and a masking construct. In certain example embodiments, RNA amplification reagents may be pre-loaded into the individual discrete volumes or be added to the individual discrete volumes concurrently with or subsequent to addition of a sample to each individual discrete volume. The device may be a microfluidic based device, a wearable device, or device comprising a flexible material substrate on which the individual discrete volumes are defined.

[0193] In another aspect, the embodiments disclosed herein are directed to a method for detecting target nucleic acids in a sample comprising distributing a sample or set of samples into a set of individual discrete volumes, each individual discrete volume comprising a CRISPR effector protein, one or more guide RNAs designed to bind to one target oligonucleotides, and a masking construct. The set of samples are then maintained under conditions sufficient to allow binding of the one or more guide RNAs to one or more target molecules. Binding of the one or more guide RNAs to a target nucleic acid in turn activates the CRISPR effector protein. Once activated, the CRISPR effector protein then deactivates the masking construct, for example, by cleaving the masking construct such that a detectable positive signal is unmasked, released, or generated. Detection of the positive detectable signal in an individual discrete volume indicates the presence of the target molecules.

[0194] In yet another aspect, the embodiments disclosed herein are directed to a method for detecting polypeptides. The method for detecting polypeptides is similar to the method for detecting target nucleic acids described above. However, a peptide detection aptamer is also included. The peptide detection aptamers function as described above and facilitate generation of a trigger oligonucleotide upon binding to a target polypeptide. The guide RNAs are designed to recognize the trigger oligonucleotides thereby activating the CRISPR effector protein.

[0195] Deactivation of the masking construct by the activated CRISPR effector protein leads to unmasking, release, or generation of a detectable positive signal.

### Nucleic Acid Detection Systems

[0196] In some embodiments, the invention provides a nucleic acid detection system comprising i) two or more CRISPR systems, each CRISPR system comprising a Cas protein and a guide molecule comprising a guide sequence capable of binding a corresponding target molecule and designed to form a complex with the Cas protein; and ii) a set of detection constructs, each detection construct comprising a cutting motif sequence that is preferentially cut by one of the activated CRISPR effector proteins.

### CRISPR Systems

[0197] In general, a CRISPR-Cas or CRISPR system as used herein and in documents, such as WO 2014/093622 (PCT/US2013/074667), refers collectively to transcripts and other elements involved in the expression of or directing the activity of CRISPR-associated (“Cas”) genes, including sequences encoding a Cas gene, a tracr (trans-activating CRISPR) sequence (e.g. tracrRNA or an active partial tracrRNA), a tracr-mate sequence (encompassing a “direct repeat” and a tracrRNA-processed partial direct repeat in the context of an endogenous CRISPR system), a guide sequence (also referred to as a “spacer” in the context of an endogenous CRISPR system), or “RNA(s)” as that term is herein used (e.g., RNA(s) to guide Cas, such as Cas9, e.g. CRISPR RNA and transactivating (tracr) RNA or a single guide RNA (sgRNA) (chimeric RNA)) or other sequences and transcripts from a CRISPR locus. In general, a CRISPR system is characterized by elements that promote the formation of a CRISPR complex at the site of a target sequence (also referred to as a protospacer in the context of an endogenous CRISPR system). When the CRISPR protein is a C2c2 protein, a tracrRNA is not required. C2c2 has been described in Abudayyeh et al. (2016) “C2c2 is a single-component programmable RNA-guided RNA-targeting CRISPR effector”; Science; DOI: 10.1126/science.aaf5573; and Shmakov et al. (2015) “Discovery and Functional Characterization of Diverse Class 2 CRISPR-Cas Systems”, Molecular Cell, DOI: dx.doi.org/10.1016/j.molce1.2015.10.008; which are incorporated herein in their entirety by reference. Cas13b has been described in Smargon et al. (2017) “Cas13b Is a Type VI-B CRISPR-Associated RNA-Guided RNases Differentially Regulated by Accessory Proteins Csx27 and Csx28,” Molecular Cell. 65, 1-13; dx.doi.org/10.1016/j.molce1.2016.12.023., which is incorporated herein in its entirety by reference.

[0198] In certain embodiments, a protospacer adjacent motif (PAM) or PAM-like motif directs binding of the effector protein complex as disclosed herein to the target locus of interest. In some embodiments, the PAM may be a 5′ PAM (i.e., located upstream of the 5′ end of the protospacer). In other embodiments, the PAM may be a 3′ PAM (i.e., located downstream of the 5′ end of the protospacer). The term “PAM” may be used interchangeably with the term “PFS” or “protospacer flanking site” or “protospacer flanking sequence”.

[0199] In a preferred embodiment, the CRISPR effector protein may recognize a 3′ PAM. In certain embodiments, the CRISPR effector protein may recognize a 3′ PAM which is 5′H, wherein H is A, C or U. In certain embodiments, the effector protein may be Leptotrichia shahii C2c2p, more preferably Leptotrichia shahii DSM 19757 C2c2, and the 3′ PAM is a 5′ H.

[0200] In the context of formation of a CRISPR complex, “target molecule or “target sequence” refers to a molecule harboring a sequence, or a sequence to which a guide sequence is designed to have complementarity, where hybridization between a target sequence and a guide sequence promotes the formation of a CRISPR complex. A target sequence may comprise RNA polynucleotides. The term “target RNA” refers to a RNA polynucleotide being or comprising the target sequence. In other words, the target RNA may be a RNA polynucleotide or a part of a RNA polynucleotide to which a part of the gRNA, i.e. the guide sequence, is designed to have complementarity and to which the effector function mediated by the complex comprising CRISPR effector protein and a gRNA is to be directed. In some embodiments, a target sequence is located in the nucleus or cytoplasm of a cell. A target sequence may comprise DNA polynucleotides.

[0201] As such, a CRISPR system may comprise RNA-targeting effector proteins. A CRISPR system may comprise DNA-targeting effector proteins. In some embodiments, a CRISPR system may comprise a combination of RNA- and DNA-targeting effector proteins, or effector proteins that target both RNA and DNA.

[0202] The nucleic acid molecule encoding a CRISPR effector protein, in particular C2c2, is advantageously codon optimized CRISPR effector protein. An example of a codon optimized sequence, is in this instance a sequence optimized for expression in eukaryotes, e.g., humans (i.e. being optimized for expression in humans), or for another eukaryote, animal or mammal as herein discussed; see, e.g., SaCas9 human codon optimized sequence in WO 2014/093622 (PCT/US2013/074667). Whilst this is preferred, it will be appreciated that other examples are possible and codon optimization for a host species other than human, or for codon optimization for specific organs is known. In some embodiments, an enzyme coding sequence encoding a CRISPR effector protein is a codon optimized for expression in particular cells, such as eukaryotic cells. The eukaryotic cells may be those of or derived from a particular organism, such as a plant or a mammal, including but not limited to human, or non-human eukaryote or animal or mammal as herein discussed, e.g., mouse, rat, rabbit, dog, livestock, or non-human mammal or primate. In some embodiments, processes for modifying the germ line genetic identity of human beings and/or processes for modifying the genetic identity of animals which are likely to cause them suffering without any substantial medical benefit to man or animal, and also animals resulting from such processes, may be excluded. In general, codon optimization refers to a process of modifying a nucleic acid sequence for enhanced expression in the host cells of interest by replacing at least one codon (e.g. about or more than about 1, 2, 3, 4, 5, 10, 15, 20, 25, 50, or more codons) of the native sequence with codons that are more frequently or most frequently used in the genes of that host cell while maintaining the native amino acid sequence. Various species exhibit particular bias for certain codons of a particular amino acid. Codon bias (differences in codon usage between organisms) often correlates with the efficiency of translation of messenger RNA (mRNA), which is in turn believed to be dependent on, among other things, the properties of the codons being translated and the availability of particular transfer RNA (tRNA) molecules. The predominance of selected tRNAs in a cell is generally a reflection of the codons used most frequently in peptide synthesis. Accordingly, genes can be tailored for optimal gene expression in a given organism based on codon optimization. Codon usage tables are readily available, for example, at the “Codon Usage Database” available at kazusa.orjp/codon/ and these tables can be adapted in a number of ways. See Nakamura, Y., et al. “Codon usage tabulated from the international DNA sequence databases: status for the year 2000” Nucl. Acids Res. 28:292 (2000). Computer algorithms for codon optimizing a particular sequence for expression in a particular host cell are also available, such as Gene Forge (Aptagen; Jacobus, Pa.), are also available. In some embodiments, one or more codons (e.g. 1, 2, 3, 4, 5, 10, 15, 20, 25, 50, or more, or all codons) in a sequence encoding a Cas correspond to the most frequently used codon for a particular amino acid.

[0203] In certain embodiments, the methods as described herein may comprise providing a Cas transgenic cell, in particular a C2c2 transgenic cell, in which one or more nucleic acids encoding one or more guide RNAs are provided or introduced operably connected in the cell with a regulatory element comprising a promoter of one or more gene of interest. As used herein, the term “Cas transgenic cell” refers to a cell, such as a eukaryotic cell, in which a Cas gene has been genomically integrated. The nature, type, or origin of the cell are not particularly limiting according to the present invention. Also the way the Cas transgene is introduced in the cell may vary and can be any method as is known in the art. In certain embodiments, the Cas transgenic cell is obtained by introducing the Cas transgene in an isolated cell. In certain other embodiments, the Cas transgenic cell is obtained by isolating cells from a Cas transgenic organism. By means of example, and without limitation, the Cas transgenic cell as referred to herein may be derived from a Cas transgenic eukaryote, such as a Cas knock-in eukaryote. Reference is made to WO 2014/093622 (PCT/US13/74667), incorporated herein by reference. Methods of US Patent Publication Nos. 20120017290 and 20110265198 assigned to Sangamo BioSciences, Inc. directed to targeting the Rosa locus may be modified to utilize the CRISPR Cas system of the present invention. Methods of US Patent Publication No. 20130236946 assigned to Cellectis directed to targeting the Rosa locus may also be modified to utilize the CRISPR Cas system of the present invention. By means of further example reference is made to Platt et. al. (Cell; 159(2):440-455 (2014)), describing a Cas9 knock-in mouse, which is incorporated herein by reference. The Cas transgene can further comprise a Lox-Stop-polyA-Lox (LSL) cassette thereby rendering Cas expression inducible by Cre recombinase. Alternatively, the Cas transgenic cell may be obtained by introducing the Cas transgene in an isolated cell. Delivery systems for transgenes are well known in the art. By means of example, the Cas transgene may be delivered in for instance eukaryotic cell by means of vector (e.g., AAV, adenovirus, lentivirus) and/or particle and/or nanoparticle delivery, as also described herein elsewhere.

[0204] It will be understood by the skilled person that the cell, such as the Cas transgenic cell, as referred to herein may comprise further genomic alterations besides having an integrated Cas gene or the mutations arising from the sequence specific action of Cas when complexed with RNA capable of guiding Cas to a target locus.

[0205] In certain aspects the invention involves vectors, e.g. for delivering or introducing in a cell Cas and/or RNA capable of guiding Cas to a target locus (i.e. guide RNA), but also for propagating these components (e.g. in prokaryotic cells). A used herein, a “vector” is a tool that allows or facilitates the transfer of an entity from one environment to another. It is a replicon, such as a plasmid, phage, or cosmid, into which another DNA segment may be inserted so as to bring about the replication of the inserted segment. Generally, a vector is capable of replication when associated with the proper control elements. In general, the term “vector” refers to a nucleic acid molecule capable of transporting another nucleic acid to which it has been linked. Vectors include, but are not limited to, nucleic acid molecules that are single-stranded, double-stranded, or partially double-stranded; nucleic acid molecules that comprise one or more free ends, no free ends (e.g. circular); nucleic acid molecules that comprise DNA, RNA, or both; and other varieties of polynucleotides known in the art. One type of vector is a “plasmid,” which refers to a circular double stranded DNA loop into which additional DNA segments can be inserted, such as by standard molecular cloning techniques. Another type of vector is a viral vector, wherein virally-derived DNA or RNA sequences are present in the vector for packaging into a virus (e.g. retroviruses, replication defective retroviruses, adenoviruses, replication defective adenoviruses, and adeno-associated viruses (AAVs)). Viral vectors also include polynucleotides carried by a virus for transfection into a host cell. Certain vectors are capable of autonomous replication in a host cell into which they are introduced (e.g. bacterial vectors having a bacterial origin of replication and episomal mammalian vectors). Other vectors (e.g., non-episomal mammalian vectors) are integrated into the genome of a host cell upon introduction into the host cell, and thereby are replicated along with the host genome. Moreover, certain vectors are capable of directing the expression of genes to which they are operatively-linked. Such vectors are referred to herein as “expression vectors.” Common expression vectors of utility in recombinant DNA techniques are often in the form of plasmids.

[0206] Recombinant expression vectors can comprise a nucleic acid of the invention in a form suitable for expression of the nucleic acid in a host cell, which means that the recombinant expression vectors include one or more regulatory elements, which may be selected on the basis of the host cells to be used for expression, that is operatively-linked to the nucleic acid sequence to be expressed. Within a recombinant expression vector, “operably linked” is intended to mean that the nucleotide sequence of interest is linked to the regulatory element(s) in a manner that allows for expression of the nucleotide sequence (e.g. in an in vitro transcription/translation system or in a host cell when the vector is introduced into the host cell). With regards to recombination and cloning methods, mention is made of U.S. patent application Ser. No. 10/815,730, published Sep. 2, 2004 as US 2004-0171156 A1, the contents of which are herein incorporated by reference in their entirety. Thus, the embodiments disclosed herein may also comprise transgenic cells comprising the CRISPR effector system. In certain example embodiments, the transgenic cell may function as an individual discrete volume. In other words samples comprising a masking construct may be delivered to a cell, for example in a suitable delivery vesicle and if the target is present in the delivery vesicle the CRISPR effector is activated and a detectable signal generated.

[0207] The vector(s) can include the regulatory element(s), e.g., promoter(s). The vector(s) can comprise Cas encoding sequences, and/or a single, but possibly also can comprise at least 3 or 8 or 16 or 32 or 48 or 50 guide RNA(s) (e.g., sgRNAs) encoding sequences, such as 1-2, 1-3, 1-4 1-5, 3-6, 3-7, 3-8, 3-9, 3-10, 3-8, 3-16, 3-30, 3-32, 3-48, 3-50 RNA(s) (e.g., sgRNAs). In a single vector there can be a promoter for each RNA (e.g., sgRNA), advantageously when there are up to about 16 RNA(s); and, when a single vector provides for more than 16 RNA(s), one or more promoter(s) can drive expression of more than one of the RNA(s), e.g., when there are 32 RNA(s), each promoter can drive expression of two RNA(s), and when there are 48 RNA(s), each promoter can drive expression of three RNA(s). By simple arithmetic and well established cloning protocols and the teachings in this disclosure one skilled in the art can readily practice the invention as to the RNA(s) for a suitable exemplary vector such as AAV, and a suitable promoter such as the U6 promoter. For example, the packaging limit of AAV is ˜4.7 kb. The length of a single U6-gRNA (plus restriction sites for cloning) is 361 bp. Therefore, the skilled person can readily fit about 12-16, e.g., 13 U6-gRNA cassettes in a single vector. This can be assembled by any suitable means, such as a golden gate strategy used for TALE assembly (genome-engineering.org/taleffectors/). The skilled person can also use a tandem guide strategy to increase the number of U6-gRNAs by approximately 1.5 times, e.g., to increase from 12-16, e.g., 13 to approximately 18-24, e.g., about 19 U6-gRNAs. Therefore, one skilled in the art can readily reach approximately 18-24, e.g., about 19 promoter-RNAs, e.g., U6-gRNAs in a single vector, e.g., an AAV vector. A further means for increasing the number of promoters and RNAs in a vector is to use a single promoter (e.g., U6) to express an array of RNAs separated by cleavable sequences. And an even further means for increasing the number of promoter-RNAs in a vector, is to express an array of promoter-RNAs separated by cleavable sequences in the intron of a coding sequence or gene; and, in this instance it is advantageous to use a polymerase II promoter, which can have increased expression and enable the transcription of long RNA in a tissue specific manner. (see, e.g., nar.oxfordjournals.org/content/34/7/e53. short and nature.com/mt/journal/v16/n9/abs/mt2008144a.html). In an advantageous embodiment, AAV may package U6 tandem gRNA targeting up to about 50 genes. Accordingly, from the knowledge in the art and the teachings in this disclosure the skilled person can readily make and use vector(s), e.g., a single vector, expressing multiple RNAs or guides under the control or operatively or functionally linked to one or more promoters—especially as to the numbers of RNAs or guides discussed herein, without any undue experimentation.

[0208] The guide RNA(s) encoding sequences and/or Cas encoding sequences, can be functionally or operatively linked to regulatory element(s) and hence the regulatory element(s) drive expression. The promoter(s) can be constitutive promoter(s) and/or conditional promoter(s) and/or inducible promoter(s) and/or tissue specific promoter(s). The promoter can be selected from the group consisting of RNA polymerases, pol I, pol II, pol III, T7, U6, H1, retroviral Rous sarcoma virus (RSV) LTR promoter, the cytomegalovirus (CMV) promoter, the SV40 promoter, the dihydrofolate reductase promoter, the (3-actin promoter, the phosphoglycerol kinase (PGK) promoter, and the EF1α promoter. An advantageous promoter is the promoter is U6.

[0209] In some embodiments, one or more elements of a nucleic acid-targeting system is derived from a particular organism comprising an endogenous CRISPR RNA-targeting system. In certain example embodiments, the effector protein CRISPR RNA-targeting system comprises at least one HEPN domain, including but not limited to the HEPN domains described herein, HEPN domains known in the art, and domains recognized to be HEPN domains by comparison to consensus sequence motifs. Several such domains are provided herein. In one non-limiting example, a consensus sequence can be derived from the sequences of C2c2 or Cas13b orthologs provided herein. In certain example embodiments, the effector protein comprises a single HEPN domain. In certain other example embodiments, the effector protein comprises two HEPN domains.

[0210] In one example embodiment, the effector protein comprises one or more HEPN domains comprising a RxxxxH motif sequence. The RxxxxH motif sequence can be, without limitation, from a HEPN domain described herein or a HEPN domain known in the art. RxxxxH motif sequences further include motif sequences created by combining portions of two or more HEPN domains. As noted, consensus sequences can be derived from the sequences of the orthologs disclosed in U.S. Provisional Patent Application 62/432,240 entitled “Novel CRISPR Enzymes and Systems,” U.S. Provisional Patent Application 62/471,710 entitled “Novel Type VI CRISPR Orthologs and Systems” filed on Mar. 15, 2017, and U.S. Provisional Patent Application entitled “Novel Type VI CRISPR Orthologs and Systems,” labeled as attorney docket number 47627-05-2133 and filed on Apr. 12, 2017.

[0211] In an embodiment of the invention, a HEPN domain comprises at least one RxxxxH motif comprising the sequence of R{N/H/K}X1X2X3H (SEQ ID NO:144). In an embodiment of the invention, a HEPN domain comprises a RxxxxH motif comprising the sequence of R{N/H}X1X2X3H (SEQ ID NO:145). In an embodiment of the invention, a HEPN domain comprises the sequence of R{N/K}X1X2X3H (SEQ ID NO:146). In certain embodiments, X1 is R, S, D, E, Q, N, G, Y, or H. In certain embodiments, X2 is I, S, T, V, or L. In certain embodiments, X3 is L, F, N, Y, V, I, S, D, E, or A.

[0212] Additional effectors for use according to the invention can be identified by their proximity to cas1 genes, for example, though not limited to, within the region 20 kb from the start of the cas1 gene and 20 kb from the end of the cas1 gene. In certain embodiments, the effector protein comprises at least one HEPN domain and at least 500 amino acids, and wherein the C2c2 effector protein is naturally present in a prokaryotic genome within 20 kb upstream or downstream of a Cas gene or a CRISPR array. Non-limiting examples of Cas proteins include Cas1, Cas1B, Cas2, Cas3, Cas4, Cas5, Cash, Cas7, Cas8, Cas9 (also known as Csn1 and Csx12), Cas10, Csy1, Csy2, Csy3, Cse1, Cse2, Csc1, Csc2, Csa5, Csn2, Csm2, Csm3, Csm4, Csm5, Csm6, Cmr1, Cmr3, Cmr4, Cmr5, Cmr6, Csb1, Csb2, Csb3, Csx17, Csx14, Csx10, Csx16, CsaX, Csx3, Csx1, Csx15, Csf1, Csf2, Csf3, Csf4, homologues thereof, or modified versions thereof. In certain example embodiments, the C2c2 effector protein is naturally present in a prokaryotic genome within 20 kb upstream or downstream of a Cas 1 gene. The terms “orthologue” (also referred to as “ortholog” herein) and “homologue” (also referred to as “homolog” herein) are well known in the art. By means of further guidance, a “homologue” of a protein as used herein is a protein of the same species which performs the same or a similar function as the protein it is a homologue of Homologous proteins may but need not be structurally related, or are only partially structurally related. An “orthologue” of a protein as used herein is a protein of a different species which performs the same or a similar function as the protein it is an orthologue of. Orthologous proteins may but need not be structurally related, or are only partially structurally related.

[0213] In particular embodiments, the Type VI RNA-targeting Cas enzyme is C2c2. In other example embodiments, the Type VI RNA-targeting Cas enzyme is Cas13b. In certain embodiments, the Cas13b protein is from an organism of a genus selected from the group consisting of: Bergeyella, Prevotella, Porphyromonas, Bacterioides, Alistipes, Riemerella, Myroides, Capnocytophaga, Porphyromonas, Flavobacterium, Porphyromonas, Chryseobacterium, Paludibacter, Psychroflexus, Riemerella, Phaeodactylibacter, Sinomicrobium, Reichenbachiella.

[0214] In particular embodiments, the homologue or orthologue of a Type VI protein such as C2c2 as referred to herein has a sequence homology or identity of at least 30%, or at least 40%, or at least 50%, or at least 60%, or at least 70%, or at least 80%, more preferably at least 85%, even more preferably at least 90%, such as for instance at least 95% with a Type VI protein such as C2c2 (e.g., based on the wild-type sequence of any of Leptotrichia shahii C2c2, Lachnospiraceae bacterium MA2020 C2c2, Lachnospiraceae bacterium NK4A179 C2c2, Clostridium aminophilum (DSM 10710) C2c2, Carnobacterium gallinarum (DSM 4847) C2c2, Paludibacter propionicigenes (WB4) C2c2, Listeria weihenstephanensis (FSL R9-0317) C2c2, Listeriaceae bacterium (FSL M6-0635) C2c2, Listeria newyorkensis (FSL M6-0635) C2c2, Leptotrichia wadei (F0279) C2c2, Rhodobacter capsulatus (SB 1003) C2c2, Rhodobacter capsulatus (R121) C2c2, Rhodobacter capsulatus (DE442) C2c2, Leptotrichia wadei (Lw2) C2c2, or Listeria seeligeri C2c2). In further embodiments, the homologue or orthologue of a Type VI protein such as C2c2 as referred to herein has a sequence identity of at least 30%, or at least 40%, or at least 50%, or at least 60%, or at least 70%, or at least 80%, more preferably at least 85%, even more preferably at least 90%, such as for instance at least 95% with the wild type C2c2 (e.g., based on the wild-type sequence of any of Leptotrichia shahii C2c2, Lachnospiraceae bacterium MA2020 C2c2, Lachnospiraceae bacterium NK4A179 C2c2, Clostridium aminophilum (DSM 10710) C2c2, Carnobacterium gallinarum (DSM 4847) C2c2, Paludibacter propionicigenes (WB4) C2c2, Listeria weihenstephanensis (FSL R9-0317) C2c2, Listeriaceae bacterium (FSL M6-0635) C2c2, Listeria newyorkensis (FSL M6-0635) C2c2, Leptotrichia wadei (F0279) C2c2, Rhodobacter capsulatus (SB 1003) C2c2, Rhodobacter capsulatus (R121) C2c2, Rhodobacter capsulatus (DE442) C2c2, Leptotrichia wadei (Lw2) C2c2, or Listeria seeligeri C2c2).

[0215] In certain other example embodiments, the CRISPR system the effector protein is a C2c2 nuclease. The activity of C2c2 may depend on the presence of two HEPN domains. These have been shown to be RNase domains, i.e. nuclease (in particular an endonuclease) cutting RNA. C2c2 HEPN may also target DNA, or potentially DNA and/or RNA. On the basis that the HEPN domains of C2c2 are at least capable of binding to and, in their wild-type form, cutting RNA, then it is preferred that the C2c2 effector protein has RNase function. Regarding C2c2 CRISPR systems, reference is made to U.S. Provisional 62/351,662 filed on Jun. 17, 2016 and U.S. Provisional 62/376,377 filed on Aug. 17, 2016. Reference is also made to U.S. Provisional 62/351,803 filed on Jun. 17, 2016. Reference is also made to U.S. Provisional entitled “Novel Crispr Enzymes and Systems” filed Dec. 8, 2016 bearing Broad Institute No. 10035.PA4 and Attorney Docket No. 47627.03.2133. Reference is further made to East-Seletsky et al. “Two distinct RNase activities of CRISPR-C2c2 enable guide-RNA processing and RNA detection” Nature doi:10/1038/nature19802 and Abudayyeh et al. “C2c2 is a single-component programmable RNA-guided RNA targeting CRISPR effector” bioRxiv doi:10.1101/054742.

[0216] RNase function in CRISPR systems is known, for example mRNA targeting has been reported for certain type III CRISPR-Cas systems (Hale et al., 2014, Genes Dev, vol. 28, 2432-2443; Hale et al., 2009, Cell, vol. 139, 945-956; Peng et al., 2015, Nucleic acids research, vol. 43, 406-417) and provides significant advantages. In the Staphylococcus epidermis type III-A system, transcription across targets results in cleavage of the target DNA and its transcripts, mediated by independent active sites within the Cas10-Csm ribonucleoprotein effector protein complex (see, Samai et al., 2015, Cell, vol. 151, 1164-1174). A CRISPR-Cas system, composition or method targeting RNA via the present effector proteins is thus provided.

[0217] In an embodiment, the Cas protein may be a C2c2 ortholog of an organism of a genus which includes but is not limited to Leptotrichia, Listeria, Corynebacter, Sutterella, Legionella, Treponema, Filifactor, Eubacterium, Streptococcus, Lactobacillus, Mycoplasma, Bacteroides, Flaviivola, Flavobacterium, Sphaerochaeta, Azospirillum, Gluconacetobacter, Neisseria, Roseburia, Parvibaculum, Staphylococcus, Nitratifractor, Mycoplasma and Campylobacter. Species of organism of such a genus can be as otherwise herein discussed.

[0218] Some methods of identifying orthologues of CRISPR-Cas system enzymes may involve identifying tracr sequences in genomes of interest. Identification of tracr sequences may relate to the following steps: Search for the direct repeats or tracr mate sequences in a database to identify a CRISPR region comprising a CRISPR enzyme. Search for homologous sequences in the CRISPR region flanking the CRISPR enzyme in both the sense and antisense directions. Look for transcriptional terminators and secondary structures. Identify any sequence that is not a direct repeat or a tracr mate sequence but has more than 50% identity to the direct repeat or tracr mate sequence as a potential tracr sequence. Take the potential tracr sequence and analyze for transcriptional terminator sequences associated therewith.

[0219] It will be appreciated that any of the functionalities described herein may be engineered into CRISPR enzymes from other orthologs, including chimeric enzymes comprising fragments from multiple orthologs. Examples of such orthologs are described elsewhere herein. Thus, chimeric enzymes may comprise fragments of CRISPR enzyme orthologs of an organism which includes but is not limited to Leptotrichia, Listeria, Corynebacter, Sutterella, Legionella, Treponema, Filifactor, Eubacterium, Streptococcus, Lactobacillus, Mycoplasma, Bacteroides, Flaviivola, Flavobacterium, Sphaerochaeta, Azospirillum, Gluconacetobacter, Neisseria, Roseburia, Parvibaculum, Staphylococcus, Nitratifractor, Mycoplasma and Campylobacter. A chimeric enzyme can comprise a first fragment and a second fragment, and the fragments can be of CRISPR enzyme orthologs of organisms of genera herein mentioned or of species herein mentioned; advantageously the fragments are from CRISPR enzyme orthologs of different species.

[0220] In embodiments, the C2c2 protein as referred to herein also encompasses a functional variant of C2c2 or a homologue or an orthologue thereof. A “functional variant” of a protein as used herein refers to a variant of such protein which retains at least partially the activity of that protein. Functional variants may include mutants (which may be insertion, deletion, or replacement mutants), including polymorphs, etc. Also included within functional variants are fusion products of such protein with another, usually unrelated, nucleic acid, protein, polypeptide or peptide. Functional variants may be naturally occurring or may be man-made. Advantageous embodiments can involve engineered or non-naturally occurring Type VI RNA-targeting effector protein.

[0221] In an embodiment, nucleic acid molecule(s) encoding the C2c2 or an ortholog or homolog thereof, may be codon-optimized for expression in a eukaryotic cell. A eukaryote can be as herein discussed. Nucleic acid molecule(s) can be engineered or non-naturally occurring.

[0222] In an embodiment, the C2c2 or an ortholog or homolog thereof, may comprise one or more mutations (and hence nucleic acid molecule(s) coding for same may have mutation(s). The mutations may be artificially introduced mutations and may include but are not limited to one or more mutations in a catalytic domain. Examples of catalytic domains with reference to a Cas9 enzyme may include but are not limited to RuvC I, RuvC II, RuvC III and HNH domains.

[0223] In an embodiment, the C2c2 or an ortholog or homolog thereof, may comprise one or more mutations. The mutations may be artificially introduced mutations and may include but are not limited to one or more mutations in a catalytic domain. Examples of catalytic domains with reference to a Cas enzyme may include but are not limited to HEPN domains.

[0224] In an embodiment, the C2c2 or an ortholog or homolog thereof, may be used as a generic nucleic acid binding protein with fusion to or being operably linked to a functional domain. Exemplary functional domains may include but are not limited to translational initiator, translational activator, translational repressor, nucleases, in particular ribonucleases, a spliceosome, beads, a light inducible/controllable domain or a chemically inducible/controllable domain.

[0225] In certain example embodiments, the C2c2 effector protein may be from an organism selected from the group consisting of; Leptotrichia, Listeria, Corynebacter, Sutterella, Legionella, Treponema, Filifactor, Eubacterium, Streptococcus, Lactobacillus, Mycoplasma, Bacteroides, Flaviivola, Flavobacterium, Sphaerochaeta, Azospirillum, Gluconacetobacter, Neisseria, Roseburia, Parvibaculum, Staphylococcus, Nitratifractor, Mycoplasma, and Campylobacter.

[0226] In certain embodiments, the effector protein may be a Listeria sp. C2c2p, preferably Listeria seeligeria C2c2p, more preferably Listeria seeligeria serovar 1/2b str. SLCC3954 C2c2p and the crRNA sequence may be 44 to 47 nucleotides in length, with a 5′ 29-nt direct repeat (DR) and a 15-nt to 18-nt spacer.

[0227] In certain embodiments, the effector protein may be a Leptotrichia sp. C2c2p, preferably Leptotrichia shahii C2c2p, more preferably Leptotrichia shahii DSM 19757 C2c2p and the crRNA sequence may be 42 to 58 nucleotides in length, with a 5′ direct repeat of at least 24 nt, such as a 5′ 24-28-nt direct repeat (DR) and a spacer of at least 14 nt, such as a 14-nt to 28-nt spacer, or a spacer of at least 18 nt, such as 19, 20, 21, 22, or more nt, such as 18-28, 19-28, 20-28, 21-28, or 22-28 nt.

[0228] In certain example embodiments, the effector protein may be a Leptotrichia sp., Leptotrichia wadei F0279, or a Listeria sp., preferably Listeria newyorkensis FSL M6-0635.

[0229] In certain example embodiments, the C2c2 effector proteins of the invention include, without limitation, the following 21 ortholog species (including multiple CRISPR loci: Leptotrichia shahii; Leptotrichia wadei (Lw2); Listeria seeligeri; Lachnospiraceae bacterium MA2020; Lachnospiraceae bacterium NK4A179; [Clostridium] aminophilum DSM 10710; Carnobacterium gallinarum DSM 4847; Carnobacterium gallinarum DSM 4847 (second CRISPR Loci); Paludibacter propionicigenes WB4; Listeria weihenstephanensis FSL R9-0317; Listeriaceae bacterium FSL M6-0635; Leptotrichia wadei F0279; Rhodobacter capsulatus SB 1003; Rhodobacter capsulatus R121; Rhodobacter capsulatus DE442; Leptotrichia buccalis C-1013-b; Herbinix hemicellulosilytica; [Eubacterium] rectale; Eubacteriaceae bacterium CHKCI004; Blautia sp. Marseille-P2398; and Leptotrichia sp. oral taxon 879 str. F0557. Twelve (12) further non-limiting examples are: Lachnospiraceae bacterium NK4A144; Chloroflexus aggregans; Demequina aurantiaca; Thalassospira sp. TSL5-1; Pseudobutyrivibrio sp. OR37; Butyrivibrio sp. YAB3001; Blautia sp. Marseille-P2398; Leptotrichia sp. Marseille-P3007; Bacteroides ihuae; Porphyromonadaceae bacterium KH3CP3RA; Listeria riparia; and Insolitispirillum peregrinum.

[0230] In certain embodiments, the C2c2 protein according to the invention is or is derived from one of the orthologues as described in the table below, or is a chimeric protein of two or more of the orthologues as described in the table below, or is a mutant or variant of one of the orthologues as described in the table below (or a chimeric mutant or variant), including dead C2c2, split C2c2, destabilized C2c2, etc. as defined herein elsewhere, with or without fusion with a heterologous/functional domain.

[0231] In certain example embodiments, the C2c2 effector protein is from an organism of a genus selected from the group consisting of: Leptotrichia, Listeria, Corynebacter, Sutterella, Legionella, Treponema, Filifactor, Eubacterium, Streptococcus, Lactobacillus, Mycoplasma, Bacteroides, Flaviivola, Flavobacterium, Sphaerochaeta, Azospirillum, Gluconacetobacter, Neisseria, Roseburia, Parvibaculum, Staphylococcus, Nitratifractor, Mycoplasma, Campylobacter, and Lachnospira.

[0232] In certain example embodiments, the C2c2 effector protein is selected from Table 1 below.

TABLE 1

| C2c2 orthologue | Code | Multi Letter |
|---|---|---|
| Leptotrichia shahii | C2-2 | Lsh |
| L. wadei F0279 (Lw2) | C2-3 | Lw2 |
| Listeria seeligeri | C2-4 | Lse |
| Lachnospiraceae bacterium MA2020 | C2-5 | LbM |
| Lachnospiraceae bacterium NK4A179 | C2-6 | LbNK179 |
| Clostridium aminophilum DSM 10710 | C2-7 | Ca |
| Carnobacterium gallinarum DSM 4847 | C2-8 | Cg |
| Carnobacterium gallinarum DSM 4847 | C2-9 | Cg2 |
| Paludibacter propionicigenes WB4 | C2-10 | Pp |
| Listeria weihenstephanensis FSL R9-0317 | C2-11 | Lwei |
| Listeriaceae bacterium FSL M6-0635 | C2-12 | LbFSL |
| Leptotrichia wadei F0279 | C2-13 | Lw |
| Rhodobacter capsulatus SB 1003 | C2-14 | Rc |
| Rhodobacter capsulatus R121 | C2-15 | Rc |
| Rhodobacter capsulatus DE442 | C2-16 | Rc |
| Leptotrichia buccalis C-1013-b | C2-17 | LbuC2c2 |
| Herbinix hemicellulosilytics | C2-18 | HheC2c2 |
| Eubacterium rectale | C2-19 | EreC2c2 |
| Eubacteriaceae bacterium CHKC1004 | C2-20 | EbaC2c2 |
| Blautia sp. Marseille-P2398 | C2-21 | BsmC2c2 |
| Leptotrichia sp. oral taxon 879 str. F0557 | C2-22 | LspC2c2 |
| Lachnospiraceae bacterium NK4a144 | | |
| Chloroflexus aggregans | | |
| Demequina aurantiaca | | |
| Thalassospira sp. TSL5-1 | | |
| Pseudobutyrivibrio sp. OR37 | | |
| Butyrivibrio sp. YAB3001 | | |
| Blautia sp. Marseille-P2398 | | |
| Leptotrichia sp. Marseille-P300 | | |
| Bacteroides ihuae | | |
| Porphyromonadaceae bacterium KH3CP3RA | | |
| Listeria riparia | | |
| Insolitispirillum peregrinum | | |

[0233] The wild type protein sequences of the above species are listed in Table 2 below. In certain embodiments, a nucleic acid sequence encoding the C2c2 protein is provided.

TABLE 2

| | | |
|---|---|---|
| C2c2-2 | | L. shahii (Lsh) (SEQ ID NO: 147) |
| C2c2-2 | | L. shahii (Lsh) WP_018451595.1 |
| c2c2-3 | | L. wadei (Lw2) (SEQ ID NO: 148) |
| c2c2-4 | | Listeria seeligeri (SEQ ID NO: 149) |
| c2c2-5 | 1 | Lachnospiraceae bacterium MA2020 (SEQ ID NO: 150) |
| c2c2-6 | 2 | Lachnospiraceae bacterium NK4A179 (SEQ ID NO: 151) |
| c2c2-7 | 3 | Clostridium aminophilum DSM 10710 (SEQ ID NO: 152) |
| c2c2-8 | 5 | Carnobacterium gallinarum DSM 4847 (SEQ ID NO: 153) |
| c2c2-9 | 6 | Carnobacterium gallinarum DSM 4847 (SEQ ID NO: 154) |
| c2c2-10 | 7 | Paludibacter propionicigenes WB4 (SEQ ID NO: 155) |
| c2c2-11 | 9 | Listeria weihenstephanensis FSL R9-0317 (SEQ ID NO: 156) |
| c2c2-12 | 10 | Listeriaceae bacterium FSL M6-0635 = Listeria newyorkensis |
| | | FSL M6-0635 (SEQ ID NO: 157) |
| c2c2-13 | 12 | Leptotrichia wadei F0279 (SEQ ID NO: 158) |
| c2c2-14 | 15 | Rhodobacter capsulatus SB 1003 (SEQ ID NO: 159) |
| c2c2-15 | 16 | Rhodobacter capsulatus R121 (SEQ ID NO: 160) |
| c2c2-16 | 17 | Rhodobacter capsulatus DE442 (SEQ ID NO: 161) |
| LbuC2c2 (C2-17) | | Leptorichia buccalis C-1013-b (SEQ ID NO: 162) |
| HheC2c2 (C2-18) | | Herbinix hemicellulosilytica (SEQ ID NO: 163) |
| EreC2c2 (C2-19) | | Eubacterium rectale |
| | | (SEQ ID NO: 164) |
| EbaC2C2 (C2-20) | | Eubacteriaceae bacterium CHKCI004 |
| | | (SEQ ID NO: 165) |
| C2c2 (C2-21) | | Blautia sp. Marseille-P2398 |
| | | (SEQ ID NO: 166) |
| C2c2 (C2-22) | | Leptotrichia sp. Oral taxon 879 str. F0557 |
| | | (SEQ ID NO: 167) |
| C2c2 NK4A144 | | Lachnospiraceae bacterium NK4A144 |
| (C2-23) | | |
| C2c2 Chloro_agg | | RNA-binding protein S1 Chloroflexus aggregans |
| (C2-24) | | (SEQ ID NO: 168) |
| C2c2 Dem_Aur | | Demequina aurantiaca |
| (C2-25) | | (SEQ ID NO: 169) |
| C2c2 Thal_Sp_TSL5 | | Thalassospira sp. TSL5-1 |
| (C2-26) | | (SEQ ID NO: 170) |
| C2c2 Pseudo_sp | | Pseudobutyrivibrio sp. OR37 |
| (C2-27) | | (SEQ ID NO: 171) |
| C2c2_Buty_sp (C2-28) | | Butyrivibrio sp. YAB3001 |
| C2c2_Blautia_sp | | Blautia sp. Marseille-P2398 |
| (C2-29) | | (SEQ ID NO: 172) |
| C2c2_Lepto_sp_Marseille | | Leptotrichia sp. Marseille-P3007 |
| (C2-30) | | (SEQ ID NO: 173) |
| C2c2_Bacteroides_ihuae | | Bacteroides ihuae |
| (C2-31) | | (SEQ ID NO: 174) |
| C2c2_Porph_bacterium | | Porphyromonadaceae bacterium |
| (C2-32) | | KH3CP3RA |
| C2c2_Listeria_riparia | | Listeria riparia |
| (C2-33) | | (SEQ ID NO: 175) |
| C2c2_insolitis_peregrinum | | Insolitispirillum peregrinum |
| (C2-34) | | (SEQ ID NO: 176) |

[0234] In an embodiment of the invention, there is provided effector protein which comprises an amino acid sequence having at least 80% sequence homology to the wild-type sequence of any of Leptotrichia shahii C2c2, Lachnospiraceae bacterium MA2020 C2c2, Lachnospiraceae bacterium NK4A179 C2c2, Clostridium aminophilum (DSM 10710) C2c2, Carnobacterium gallinarum (DSM 4847) C2c2, Paludibacter propionicigenes (WB4) C2c2, Listeria weihenstephanensis (FSL R9-0317) C2c2, Listeriaceae bacterium (FSL M6-0635) C2c2, Listeria newyorkensis (FSL M6-0635) C2c2, Leptotrichia wadei (F0279) C2c2, Rhodobacter capsulatus (SB 1003) C2c2, Rhodobacter capsulatus (R121) C2c2, Rhodobacter capsulatus (DE442) C2c2, Leptotrichia wadei (Lw2) C2c2, or Listeria seeligeri C2c2.

[0235] In an embodiment of the invention, the effector protein comprises an amino acid sequence having at least 80% sequence homology to a Type VI effector protein consensus sequence including but not limited to a consensus sequence described herein.

[0236] According to the invention, a consensus sequence can be generated from multiple C2c2 orthologs, which can assist in locating conserved amino acid residues, and motifs, including but not limited to catalytic residues and HEPN motifs in C2c2 orthologs that mediate C2c2 function. One such consensus sequence, generated from the 33 orthologs mentioned above using Geneious alignment is SEQ ID NO:177.

[0237] In another non-limiting example, a sequence alignment tool to assist generation of a consensus sequence and identification of conserved residues is the MUSCLE alignment tool (www.ebi.ac.uk/Tools/msa/muscle/). For example, using MUSCLE, the following amino acid locations conserved among C2c2 orthologs can be identified in Leptotrichia wadei C2c2:K2; K5; V6; E301; L331; 1335; N341; G351; K352; E375; L392; L396; D403; F446; 1466; 1470; R474 (HEPN); H475; H479 (HEPN), E508; P556; L561; 1595; Y596; F600; Y669; 1673; F681; L685; Y761; L676; L779; Y782; L836; D847; Y863; L869; 1872; K879; 1933; L954; 1958; R961; Y965; E970; R971; D972; R1046 (HEPN), H1051 (HEPN), Y1075; D1076; K1078; K1080; 11083; 11090.

[0238] An exemplary sequence alignment of HEPN domains showing highly conserved residues is shown in FIG. 50.

[0239] In certain example embodiments, the RNA-targeting effector protein is a Type VI-B effector protein, such as Cas13b and Group 29 or Group 30 proteins. In certain example embodiments, the RNA-targeting effector protein comprises one or more HEPN domains. In certain example embodiments, the RNA-targeting effector protein comprises a C-terminal HEPN domain, a N-terminal HEPN domain, or both. Regarding example Type VI-B effector proteins that may be used in the context of this invention, reference is made to U.S. application Ser. No. 15/331,792 entitled “Novel CRISPR Enzymes and Systems” and filed Oct. 21, 2016, International Patent Application No. PCT/US2016/058302 entitled “Novel CRISPR Enzymes and Systems”, and filed Oct. 21, 2016, and Smargon et al. “Cas13b is a Type VI-B CRISPR-associated RNA-Guided RNase differentially regulated by accessory proteins Csx27 and Csx28” Molecular Cell, 65, 1-13 (2017); dx.doi.org/10.1016/j.molce1.2016.12.023, and U.S. Provisional Application No. to be assigned, entitled “Novel Cas13b Orthologues CRISPR Enzymes and System” filed Mar. 15, 2017. In particular embodiments, the Cas13b enzyme is derived from Bergeyella zoohelcum. In certain other example embodiments, the effector protein is, or comprises an amino acid sequence having at least 80% sequence homology to any of the sequences listed in Table 3.

TABLE 3

| | |
|---|---|
| B-01 | Bergeyella zoohelcum |
| B-02 | Prevotella intermedia |
| B-03 | Prevotella buccae |
| B-04 | Alistipes sp. ZOR0009 |
| B-05 | Prevotella sp. MA2016 |
| B-06 | Riemerella anatipestifer |
| B-07 | Prevotella aurantiaca |
| B-08 | Prevotella saccharolytica |
| B-09 | Prevotella intermedia |
| B-10 | Capnocytophaga canimorsus |
| B-11 | Porphyromonas gulae |
| B-12 | Prevotella sp. P5-125 |
| B-13 | Flavobacterium branchiophilum |
| B-14 | Porphyromonas gingivalis |
| B-15 | Prevotella intermedia |

[0240] In certain example embodiments, the wild type sequence of the Cas13b orthologue is found in Table 4 or 5 below.

TABLE 4

| | |
|---|---|
| Bergeyella zoohelcum (SEQ ID NO: 178) | 1 |
| Prevotella intermedia (SEQ ID NO: 179) | 2 |
| Prevotella buccae (SEQ ID NO: 180) | 3 |
| Porphyromonas gingivalis (SEQ ID NO: 181) | 4 |
| Bacteroides pyogenes (SEQ ID NO: 182) | 5 |
| Alistipes sp. ZOR0009 | 6 |
| Prevotella sp. MA2016 (SEQ ID NO: 183) | 7a |
| Prevotella sp. MA2016 (SEQ ID NO: 184) | 7b |
| Riemerella anatipestifer (SEQ ID NO: 185) | 8 |
| Prevotella aurantiaca (SEQ ID NO: 186) | 9 |
| Prevotella saccharolytica (SEQ ID NO: 187) | 10 |
| HMPREF9712_03108 [Myroides odoratimimus CCUG 10230] | 11 |
| Prevotella intermedia (SEQ ID NO: 188) | 12 |
| Capnocytophaga canimorsus (SEQ ID NO: 189) | 13 |
| Porphyromonas gulae (SEQ ID NO: 190) | 14 |
| Prevotella sp. P5-125 (SEQ ID NO: 191) | 15 |
| Flavobacterium branchiophilum (SEQ ID NO: 192) | 16 |
| Myroides odoratimimus (SEQ ID NO: 193) | 17 |
| Flavobacterium columnare (SEQ ID NO: 194) | 18 |
| Porphyromonas gingivalis (SEQ ID NO: 195) | 19 |
| Porphyromonas sp. COT-052 OH4946 | 20 |
| Prevotella intermedia (SEQ ID NO: 196) | 21 |
| PIN17_0200 [Prevotella intermedia 17] | AFJ07523 |
| Prevotella intermedia (SEQ ID NO: 197) | BAU18623 |
| HMPREF6485_0083 [Prevotella buccae ATCC 33574] | EFU31981 |
| HMPREF9144_1146 [Prevotella pallens ATCC 700821] | EGQ18444 |
| HMPREF9714_02132 [Myroides odoratimimus CCUG 12901] | EHO08761 |
| HMPREF9711_00870 [Myroides odoratimimus CCUG 3837] | EKB06014 |
| HMPREF9699_02005 [Bergeyella zoohelcum ATCC 43767] | EKB54193 |
| HMPREF9151_01387 [Prevotella saccharolytica F0055] | EKY00089 |
| A343_1752 [Porphyromonas gingivalis JCVI SC001] | EOA10535 |
| HMPREF1981_03090 [Bacteroides pyogenes F0041] | ERI81700 |
| HMPREF1553_02065 [Porphyromonas gingivalis F0568] | ERJ65637 |
| HMPREF1988_01768 [Porphyromonas gingivalis F0185] | ERJ81987 |
| HMPREF1990_01800 [Porphyromonas gingivalis W4087] | ERJ87335 |
| M573_117042 [Prevotella intermedia ZT] | KJJ86756 |
| A2033_10205 [Bacteroidetes bacterium GWA2_31_9] | OFX18020.1 |
| SAMN05421542_0666 [Chryseobacterium jejuense] | SDI27289.1 |
| SAMN05444360_11366 [Chryseobacterium carnipullorum] | SHM52812.1 |
| SAMN05421786_1011119 [Chryseobacterium ureilyticum] | SIS70481.1 |
| Prevotella buccae | WP_004343581 |
| Porphyromonas gingivalis | WP_005873511 |
| Porphyromonas gingivalis | WP_005874195 |
| Prevotella pallens | WP_006044833 |
| Myroides odoratimimus | WP_006261414 |
| Myroides odoratimimus | WP_006265509 |
| Prevotella sp. MSX73 | WP_007412163 |
| Porphyromonas gingivalis | WP_012458414 |
| Paludibacter propionicigenes | WP_013446107 |
| Porphyromonas gingivalis | WP_013816155 |
| Flavobacterium columnare | WP_014165541 |
| Psychroflexus torquis | WP_015024765 |
| Riemerella anatipestifer | WP_015345620 |
| Prevotella pleuritidis | WP_021584635 |
| Porphyromonas gingivalis | WP_021663197 |
| Porphyromonas gingivalis | WP_021665475 |
| Porphyromonas gingivalis | WP_021677657 |
| Porphyromonas gingivalis | WP_021680012 |
| Porphyromonas gingivalis | WP_023846767 |
| Prevotella falsenii | WP_036884929 |
| Prevotella pleuritidis | WP_036931485 |
| [Porphyromonas gingivalis | WP_039417390 |
| Porphyromonas gulae | WP_039418912 |
| Porphyromonas gulae | WP_039419792 |
| Porphyromonas gulae | WP_039426176 |
| Porphyromonas gulae | WP_039431778 |
| Porphyromonas gulae | WP_039437199 |
| Porphyromonas gulae | WP_039442171 |
| Porphyromonas gulae | WP_039445055 |
| Capnocytophaga cynodegmi | WP_041989581 |
| Prevotella sp. P5-119 | WP_042518169 |
| Prevotella sp. P4-76 | WP_044072147 |
| Prevotella sp. P5-60 | WP_044074780 |
| Phaeodactylibacter xiamenensis | WP_044218239 |
| Flavobacterium sp. 316 | WP_045968377 |
| Porphyromonas gulae | WP_046201018 |
| WP_047431796 | Chryseobacterium sp. |
| | YR477 |
| Riemerella anatipestifer | WP_049354263 |
| Porphyromonas gingivalis | WP_052912312 |
| Porphyromonas gingivalis | WP_058019250 |
| Flavobacterium columnare | WP_060381855 |
| Porphyromonas gingivalis | WP_061156470 |
| Porphyromonas gingivalis | WP_061156637 |
| Riemerella anatipestifer | WP_061710138 |
| Flavobacterium columnare | WP_063744070 |
| Riemerella anatipestifer | WP_064970887 |
| Sinomicrobium oceani | WP_072319476.1 |
| Reichenbachiella agariperforans | WP_073124441.1 |

TABLE 5
Name or Accession No.

WP_015345620
WP_049354263
WP_061710138
6 (SEQ ID NO: 198)
SIS70481.1 (SEQ ID NO: 199)
15 (SEQ ID NO: 200)
WP_042518169
WP_044072147
WP_044074780
8_(modified) (SEQ ID NO: 201)
WP_064970887
5 (SEQ ID NO: 202)
ERI81700 (SEQ ID NO: 203)
WP_036931485
19 (SEQ ID NO: 204)
WP_012458414
WP_013816155
WP_039417390
WP_039419792
WP_039426176
WP_039437199
WP_061156470
12 (SEQ ID NO: 205)
9 (SEQ ID NO: 206)
EGQ18444 (SEQ ID NO: 207)
KJJ86756 (SEQ ID NO: 208)
WP_006044833
2 (SEQ ID NO: 209)
3 (SEQ ID NO: 210)
EFU31981 (SEQ ID NO: 211)
WP_004343581
WP_007412163
WP_044218239
21 (SEQ ID NO: 212)
BAU18623 (SEQ ID NO: 213)
WP_036884929
WP_073124441.1
AFJ07523 (SEQ ID NO: 214)
4 (SEQ ID NO: 215)
ERJ65637 (SEQ ID NO: 216)
ERJ81987 (SEQ ID NO: 217)
ERJ87335 (SEQ ID NO: 218)
WP_005873511
WP_021663197
WP_021665475
WP_021677657
WP_021680012
WP_023846767
WP_039445055
WP_061156637
WP_021584635
WP_015024765
WP_047431796
WP_072319476.1
16 (SEQ ID NO: 219)
EKY00089 (SEQ ID NO: 220)
10 (SEQ ID NO: 221)
WP_013446107
WP_045968377
SHM52812.1 (SEQ ID NO: 222)
EHO08761 (SEQ ID NO: 223)
EKB06014 (SEQ ID NO: 224)
WP_006261414
WP_006265509
11 (SEQ ID NO: 225)
17 (SEQ ID NO: 226)
OFX18020.1 (SEQ ID NO: 227)
SDI27289.1 (SEQ ID NO: 228)
WP_039442171
14 (SEQ ID NO: 229)
20 (SEQ ID NO: 230)
EOA10535 (SEQ ID NO: 231)
WP_005874195
WP_039418912
WP_039431778
WP_046201018
WP_052912312
WP_058019250
WP_014165541
13 (SEQ ID NO: 232)
WP_060381855
WP_063744070
18 (SEQ ID NO: 233)
WP_041989581
1 (SEQ ID NO: 234)
EKB54193 (SEQ ID NO: 235)
7_(modified) (SEQ ID NO: 236)
7_(modified)_-_residues_only (SEQ ID NO: 237)

[0241] In certain example embodiments, the RNA-targeting effector protein is a Cas13c effector protein as disclosed in U.S. Provisional Patent Application No. 62/525,165 filed Jun. 26, 2017, and PCT Application No. US 2017/047193 filed Aug. 16, 2017. In certain example embodiments, the Cas13c protein may be from an organism of a genus such as Fusobacterium or Anaerosalibacter. Example wildtype orthologue sequences of Cas13c are provided in Table 6 below.

TABLE 6
Name

EHO19081
WP_094899336
WP_040490876
WP_047396607
WP_035935671
WP_035906563
WP_042678931
WP_062627846
WP_005959231
WP_027128616
WP_062624740
WP_096402050

[0242] In certain example embodiments, the Cas13 protein may be selected from any of the following.

TABLE 7

| ID | Species | SEQ ID NO: |
|---|---|---|
| Cas13a1 | Leptotrichia shahii | 238 |
| Cas13a2 | Leptotrichia wadei (Lw2) | 239 |
| Cas13a3 | Listeria seeligeri | 240 |
| Cas13a4 | Lachnospiraceae bacterium MA2020 | 241 |
| Cas13a5 | Lachnospiraceae bacterium NK4A179 | 242 |
| Cas13a6 | [Clostridium] aminophilum DSM 10710 | 243 |
| Cas13a7 | Carnobacterium gallinarum DSM 4847 | 244 |
| Cas13a8 | Carnobacterium gallinarum DSM 4847 | 245 |
| Cas13a9 | Paludibacter propionicigenes WB4 | 246 |
| Cas13a10 | Listeria weihenstephanensis FSL R9-0317 | 247 |
| Cas13a11 | Listeriaceae bacterium FSL M6-0635 | 248 |
| Cas13a12 | Leptotrichia wadei F0279 | 249 |
| Cas13a13 | Rhodobacter capsulatus SB 1003 | 250 |
| Cas13a14 | Rhodobacter capsulatus R121 | 251 |
| Cas13a15 | Rhodobacter capsulatus DE442 | 252 |
| Cas13a16 | Leptotrichia buccalis C-1013-b | 253 |
| Cas13a17 | Herbinix hemicellulosilytica | 254 |
| Cas13a18 | [Eubacterium] rectale | 255 |
| Cas13a19 | Eubacteriaceae bacterium CHKCI004 | 256 |
| Cas13a20 | Blautia sp. Marseille-P2398 | 257 |
| Cas13a21 | Leptotrichia sp. oral taxon 879 str. F0557 | 258 |
| Cas13b1 | Bergeyella zoohelcum | 259 |
| Cas13b2 | Prevotella intermedia | 260 |
| Cas13b3 | Prevotella buccae | 261 |
| Cas13b4 | Alistipes sp. ZOR0009 | 262 |
| Cas13b5 | Prevotella sp. MA2016 | 263 |
| Cas13b6 | Riemerella anatipestifer | 264 |
| Cas13b7 | Prevotella aurantiaca | 265 |
| Cas13b8 | Prevotella saccharolytica | 266 |
| Cas13b9 | Prevotella intermedia | 267 |
| Cas13b10 | Capnocytophaga canimorsus | 268 |
| Cas13b11 | Porphyromonas gulae | 269 |
| Cas13b12 | Prevotella sp. P5-125 | 270 |
| Cas13b13 | Flavobacterium branchiophilum | 271 |
| Cas13b14 | Porphyromonas gingivalis | 272 |
| Cas13b15 | Prevotella intermedia | 273 |
| Cas13c1 | Fusobacterium necrophorum subsp. | 274 |
| | funduliforme ATCC 51357 contig00003 | |
| Cas13c2 | Fusobacterium necrophorum DJ-2 | 275 |
| | contig0065, whole genome shotgun sequence | |
| Cas13c3 | Fusobacterium necrophorum BFTR-1 | 276 |
| | contig0068 | |
| Ca13c4 | Fusobacterium necrophorum subsp. | 277 |
| | funduliforme 1_1_36S cont1.14 | |
| Cas13c5 | Fusobacterium perfoetens ATCC 29250 | 278 |
| | T364DRAFT scaffold00009.9 C | |
| Cas13c6 | Fusobacterium ulcerans ATCC 49185 | 279 |
| | cont2.38 | |
| Cas13c7 | Anaerosalibacter sp. ND1 genome assembly | 280 |
| | Anaerosalibacter massiliensis ND1 | |

### Cas12 Proteins

[0243] In certain example embodiments, the assays may comprise multiple Cas12 orthologs or one or more orthologs in combination with one or more Cas13 orthologs. In certain example embodiments, the Cas12 orthologs are Cpf1 orthologs. In certain other example embodiments, the Cas12 orthologs are C2c1 orthologs.

[0244] Cpf1 Orthologs

[0245] The present invention encompasses the use of a Cpf1 effector protein, derived from a Cpf1 locus denoted as subtype V-A. Herein such effector proteins are also referred to as “Cpf1p”, e.g., a Cpf1 protein (and such effector protein or Cpf1 protein or protein derived from a Cpf1 locus is also called “CRISPR enzyme”). Presently, the subtype V-A loci encompasses cas1, cas2, a distinct gene denoted cpf1 and a CRISPR array. Cpf1 (CRISPR-associated protein Cpf1, subtype PREFRAN) is a large protein (about 1300 amino acids) that contains a RuvC-like nuclease domain homologous to the corresponding domain of Cas9 along with a counterpart to the characteristic arginine-rich cluster of Cas9. However, Cpf1 lacks the HNH nuclease domain that is present in all Cas9 proteins, and the RuvC-like domain is contiguous in the Cpf1 sequence, in contrast to Cas9 where it contains long inserts including the HNH domain. Accordingly, in particular embodiments, the CRISPR-Cas enzyme comprises only a RuvC-like nuclease domain.

[0246] The programmability, specificity, and collateral activity of the RNA-guided Cpf1 also make it an ideal switchable nuclease for non-specific cleavage of nucleic acids. In one embodiment, a Cpf1 system is engineered to provide and take advantage of collateral non-specific cleavage of RNA. In another embodiment, a Cpf1 system is engineered to provide and take advantage of collateral non-specific cleavage of ssDNA. Accordingly, engineered Cpf1 systems provide platforms for nucleic acid detection and transcriptome manipulation. Cpf1 is developed for use as a mammalian transcript knockdown and binding tool. Cpf1 is capable of robust collateral cleavage of RNA and ssDNA when activated by sequence-specific targeted DNA binding.

[0247] The terms “orthologue” (also referred to as “ortholog” herein) and “homologue” (also referred to as “homolog” herein) are well known in the art. By means of further guidance, a “homologue” of a protein as used herein is a protein of the same species which performs the same or a similar function as the protein it is a homologue of Homologous proteins may but need not be structurally related, or are only partially structurally related. An “orthologue” of a protein as used herein is a protein of a different species which performs the same or a similar function as the protein it is an orthologue of Orthologous proteins may but need not be structurally related, or are only partially structurally related. Homologs and orthologs may be identified by homology modelling (see, e.g., Greer, Science vol. 228 (1985) 1055, and Blundell et al. Eur J Biochem vol 172 (1988), 513) or “structural BLAST” (Dey F, Cliff Zhang Q, Petrey D, Honig B. Toward a “structural BLAST”: using structural relationships to infer function. Protein Sci. 2013 April; 22(4):359-66. doi: 10.1002/pro.2225.). See also Shmakov et al. (2015) for application in the field of CRISPR-Cas loci. Homologous proteins may but need not be structurally related, or are only partially structurally related.

[0248] The Cpf1 gene is found in several diverse bacterial genomes, typically in the same locus with cas1, cas2, and cas4 genes and a CRISPR cassette (for example, FNFX1_1431-FNFX1_1428 of Francisella cf. novicida Fx1). Thus, the layout of this putative novel CRISPR-Cas system appears to be similar to that of type II-B. Furthermore, similar to Cas9, the Cpf1 protein contains a readily identifiable C-terminal region that is homologous to the transposon ORF-B and includes an active RuvC-like nuclease, an arginine-rich region, and a Zn finger (absent in Cas9). However, unlike Cas9, Cpf1 is also present in several genomes without a CRISPR-Cas context and its relatively high similarity with ORF-B suggests that it might be a transposon component. It was suggested that if this was a genuine CRISPR-Cas system and Cpf1 is a functional analog of Cas9 it would be a novel CRISPR-Cas type, namely type V (See Annotation and Classification of CRISPR-Cas Systems. Makarova K S, Koonin E V. Methods Mol Biol. 2015; 1311:47-75). However, as described herein, Cpf1 is denoted to be in subtype V-A to distinguish it from C2c1p which does not have an identical domain structure and is hence denoted to be in subtype V-B.

[0249] In particular embodiments, the effector protein is a Cpf1 effector protein from an organism from a genus comprising Streptococcus, Campylobacter, Nitratifractor, Staphylococcus, Parvibaculum, Roseburia, Neisseria, Gluconacetobacter, Azospirillum, Sphaerochaeta, Lactobacillus, Eubacterium, Corynebacter, Carnobacterium, Rhodobacter, Listeria, Paludibacter, Clostridium, Lachnospiraceae, Clostridiaridium, Leptotrichia, Francisella, Legionella, Alicyclobacillus, Methanomethyophilus, Porphyromonas, Prevotella, Bacteroidetes, Helcococcus, Letospira, Desulfovibrio, Desulfonatronum, Opitutaceae, Tuberibacillus, Bacillus, Brevibacilus, Methylobacterium or Acidaminococcus.

[0250] In further particular embodiments, the Cpf1 effector protein is from an organism selected from S. mutans, S. agalactiae, S. equisimilis, S. sanguinis, S. pneumonia; C. jejuni, C. coli; N. salsuginis, N. tergarcus; S. auricularis, S. carnosus; N. meningitides, N. gonorrhoeae; L. monocytogenes, L. ivanovii; C. botulinum, C. difficile, C. tetani, C. sordellii.

[0251] The effector protein may comprise a chimeric effector protein comprising a first fragment from a first effector protein (e.g., a Cpf1) ortholog and a second fragment from a second effector (e.g., a Cpf1) protein ortholog, and wherein the first and second effector protein orthologs are different. At least one of the first and second effector protein (e.g., a Cpf1) orthologs may comprise an effector protein (e.g., a Cpf1) from an organism comprising Streptococcus, Campylobacter, Nitratifractor, Staphylococcus, Parvibaculum, Roseburia, Neisseria, Gluconacetobacter, Azospirillum, Sphaerochaeta, Lactobacillus, Eubacterium, Corynebacter, Carnobacterium, Rhodobacter, Listeria, Paludibacter, Clostridium, Lachnospiraceae, Clostridiaridium, Leptotrichia, Francisella, Legionella, Alicyclobacillus, Methanomethyophilus, Porphyromonas, Prevotella, Bacteroidetes, Helcococcus, Letospira, Desulfovibrio, Desulfonatronum, Opitutaceae, Tuberibacillus, Bacillus, Brevibacilus, Methylobacterium or Acidaminococcus; e.g., a chimeric effector protein comprising a first fragment and a second fragment wherein each of the first and second fragments is selected from a Cpf1 of an organism comprising Streptococcus, Campylobacter, Nitratifractor, Staphylococcus, Parvibaculum, Roseburia, Neisseria, Gluconacetobacter, Azospirillum, Sphaerochaeta, Lactobacillus, Eubacterium, Corynebacter, Carnobacterium, Rhodobacter, Listeria, Paludibacter, Clostridium, Lachnospiraceae, Clostridiaridium, Leptotrichia, Francisella, Legionella, Alicyclobacillus, Methanomethyophilus, Porphyromonas, Prevotella, Bacteroidetes, Helcococcus, Letospira, Desulfovibrio, Desulfonatronum, Opitutaceae, Tuberibacillus, Bacillus, Brevibacilus, Methylobacterium or Acidaminococcus wherein the first and second fragments are not from the same bacteria; for instance a chimeric effector protein comprising a first fragment and a second fragment wherein each of the first and second fragments is selected from a Cpf1 of S. mutans, S. agalactiae, S. equisimilis, S. sanguinis, S. pneumonia; C. jejuni, C. coli; N. salsuginis, N. tergarcus; S. auricularis, S. carnosus; N. meningitides, N. gonorrhoeae; L. monocytogenes, L. ivanovii; C. botulinum, C. difficile, C. tetani, C. sordellii; Francisella tularensis 1, Prevotella albensis, Lachnospiraceae bacterium MC2017 1, Butyrivibrio proteoclasticus, Peregrinibacteria bacterium GW2011_GWA2_33_10, Parcubacteria bacterium GW2011_GWC2_44_17, Smithella sp. SCADC, Acidaminococcus sp. BV3L6, Lachnospiraceae bacterium MA2020, Candidatus Methanoplasma termitum, Eubacterium eligens, Moraxella bovoculi 237, Leptospira inadai, Lachnospiraceae bacterium ND2006, Porphyromonas crevioricanis 3, Prevotella disiens and Porphyromonas macacae, wherein the first and second fragments are not from the same bacteria.

[0252] In a more preferred embodiment, the Cpf1p is derived from a bacterial species selected from Francisella tularensis 1, Prevotella albensis, Lachnospiraceae bacterium MC2017 1, Butyrivibrio proteoclasticus, Peregrinibacteria bacterium GW2011_GWA2_33_10, Parcubacteria bacterium GW2011_GWC2_44_17, Smithella sp. SCADC, Acidaminococcus sp. BV3L6, Lachnospiraceae bacterium MA2020, Candidatus Methanoplasma termitum, Eubacterium eligens, Moraxella bovoculi 237, Leptospira inadai, Lachnospiraceae bacterium ND2006, Porphyromonas crevioricanis 3, Prevotella disiens and Porphyromonas macacae. In certain embodiments, the Cpf1p is derived from a bacterial species selected from Acidaminococcus sp. BV3L6, Lachnospiraceae bacterium MA2020. In certain embodiments, the effector protein is derived from a subspecies of Francisella tularensis 1, including but not limited to Francisella tularensis subsp. Novicida.

[0253] In some embodiments, the Cpf1p is derived from an organism from the genus of Eubacterium. In some embodiments, the CRISPR effector protein is a Cpf1 protein derived from an organism from the bacterial species of Eubacterium rectale. In some embodiments, the amino acid sequence of the Cpf1 effector protein corresponds to NCBI Reference Sequence WP_055225123.1, NCBI Reference Sequence WP_055237260.1, NCBI Reference Sequence WP_055272206.1, or GenBank ID OLA16049.1. In some embodiments, the Cpf1 effector protein has a sequence homology or sequence identity of at least 60%, more particularly at least 70, such as at least 80%, more preferably at least 85%, even more preferably at least 90%, such as for instance at least 95%, with NCBI Reference Sequence WP_055225123.1, NCBI Reference Sequence WP_055237260.1, NCBI Reference Sequence WP_055272206.1, or GenBank ID OLA16049.1. The skilled person will understand that this includes truncated forms of the Cpf1 protein whereby the sequence identity is determined over the length of the truncated form. In some embodiments, the Cpf1 effector recognizes the PAM sequence of TTTN or CTTN.

[0254] In particular embodiments, the homologue or orthologue of Cpf1 as referred to herein has a sequence homology or identity of at least 80%, more preferably at least 85%, even more preferably at least 90%, such as for instance at least 95% with Cpf1. In further embodiments, the homologue or orthologue of Cpf1 as referred to herein has a sequence identity of at least 80%, more preferably at least 85%, even more preferably at least 90%, such as for instance at least 95% with the wild type Cpf1. Where the Cpf1 has one or more mutations (mutated), the homologue or orthologue of said Cpf1 as referred to herein has a sequence identity of at least 80%, more preferably at least 85%, even more preferably at least 90%, such as for instance at least 95% with the mutated Cpf1.

[0255] In an embodiment, the Cpf1 protein may be an ortholog of an organism of a genus which includes, but is not limited to Acidaminococcus sp, Lachnospiraceae bacterium or Moraxella bovoculi; in particular embodiments, the type V Cas protein may be an ortholog of an organism of a species which includes, but is not limited to Acidaminococcus sp. BV3L6; Lachnospiraceae bacterium ND2006 (LbCpf1) or Moraxella bovoculi 237. In particular embodiments, the homologue or orthologue of Cpf1 as referred to herein has a sequence homology or identity of at least 80%, more preferably at least 85%, even more preferably at least 90%, such as for instance at least 95% with one or more of the Cpf1 sequences disclosed herein. In further embodiments, the homologue or orthologue of Cpf as referred to herein has a sequence identity of at least 80%, more preferably at least 85%, even more preferably at least 90%, such as for instance at least 95% with the wild type FnCpf1, AsCpf1 or LbCpf1.

[0256] In particular embodiments, the Cpf1 protein of the invention has a sequence homology or identity of at least 60%, more particularly at least 70, such as at least 80%, more preferably at least 85%, even more preferably at least 90%, such as for instance at least 95% with FnCpf1, AsCpf1 or LbCpf1. In further embodiments, the Cpf1 protein as referred to herein has a sequence identity of at least 60%, such as at least 70%, more particularly at least 80%, more preferably at least 85%, even more preferably at least 90%, such as for instance at least 95% with the wild type AsCpf1 or LbCpf1. In particular embodiments, the Cpf1 protein of the present invention has less than 60% sequence identity with FnCpf1. The skilled person will understand that this includes truncated forms of the Cpf1 protein whereby the sequence identity is determined over the length of the truncated form.

[0257] In certain of the following, Cpf1 amino acids are followed by nuclear localization signals (NLS) (italics), a glycine-serine (GS) linker, and 3× HA tag. 1—Franscisella tularensis subsp. novicida U112 (FnCpf1) (SEQ ID NO:281); 3—Lachnospiraceae bacterium MC2017 (Lb3Cpf1) (SEQ ID NO:282); 4—Butyrivibrio proteoclasticus (BpCpf1) (SEQ ID NO:283); 5—Peregrinibacteria bacterium GW2011_GWA_33_10 (PeCpf1) (SEQ ID NO:284); 6—Parcubacteria bacterium GWC2011_GWC2_44_17 (PbCpf1) (SEQ ID NO:285); 7—Smithella sp. SC_K08D17 (SsCpf1) (SEQ ID NO:286); 8—Acidaminococcus sp. BV3L6 (AsCpf1) (SEQ ID NO:287); 9—Lachnospiraceae bacterium MA2020 (Lb2Cpf1) (SEQ ID NO:288); 10-Candidatus Methanoplasma termitum (CMtCpf1) (SEQ ID NO:289); 11—Eubacterium eligens (EeCpf1) (SEQ ID NO:290); 12—Moraxella bovoculi 237 (MbCpf1) (SEQ ID NO:291); 13—Leptospira inadai (LiCpf1) (SEQ ID NO:292); 14—Lachnospiraceae bacterium ND2006 (LbCpf1) (SEQ ID NO:293); 15—Porphyromonas crevioricanis (PcCpf1) (SEQ ID NO:294); 16—Prevotella disiens (PdCpf1) (SEQ ID NO:295); 17—Porphyromonas macacae (PmCpf1) (SEQ ID NO:296); 18—Thiomicrospira sp. XS5 (TsCpf1) (SEQ ID NO:297); 19—Moraxella bovoculi AAX08_00205 (Mb2Cpf1) (SEQ ID NO:298); 20—Moraxella bovoculi AAX11_00205 (Mb3Cpf1) (SEQ ID NO:299); and 21—Butyrivibrio sp. NC3005 (BsCpf1) (SEQ ID NO:300).

[0258] Further Cpf1 orthologs include NCBI WP_055225123.1, NCBI WP_055237260.1, NCBI WP_055272206.1, and GenBank OLA16049.1.

[0259] C2c1 Orthologs

[0260] The present invention encompasses the use of a C2c1 effector proteins, derived from a C2c1 locus denoted as subtype V-B. Herein such effector proteins are also referred to as “C2c1p”, e.g., a C2c1 protein (and such effector protein or C2c1 protein or protein derived from a C2c1 locus is also called “CRISPR enzyme”). Presently, the subtype V-B loci encompasses cas1-Cas4 fusion, cas2, a distinct gene denoted C2c1 and a CRISPR array. C2c1 (CRISPR-associated protein C2c1) is a large protein (about 1100-1300 amino acids) that contains a RuvC-like nuclease domain homologous to the corresponding domain of Cas9 along with a counterpart to the characteristic arginine-rich cluster of Cas9. However, C2c1 lacks the HNH nuclease domain that is present in all Cas9 proteins, and the RuvC-like domain is contiguous in the C2c1 sequence, in contrast to Cas9 where it contains long inserts including the HNH domain. Accordingly, in particular embodiments, the CRISPR-Cas enzyme comprises only a RuvC-like nuclease domain.

[0261] C2c1 (also known as Cas12b) proteins are RNA guided nucleases. Its cleavage relies on a tracr RNA to recruit a guide RNA comprising a guide sequence and a direct repeat, where the guide sequence hybridizes with the target nucleotide sequence to form a DNA/RNA heteroduplex. Based on current studies, C2c1 nuclease activity also requires relies on recognition of PAM sequence. C2c1 PAM sequences are T-rich sequences. In some embodiments, the PAM sequence is 5′ TTN 3′ or 5′ ATTN 3′, wherein N is any nucleotide. In a particular embodiment, the PAM sequence is 5′ TTC 3′. In a particular embodiment, the PAM is in the sequence of Plasmodium falciparum.

[0262] C2c1 creates a staggered cut at the target locus, with a 5′ overhang, or a “sticky end” at the PAM distal side of the target sequence. In some embodiments, the 5′ overhang is 7 nt. See Lewis and Ke, Mol Cell. 2017 Feb. 2; 65(3):377-379.

[0263] The invention provides C2c1 (Type V-B; Cas12b) effector proteins and orthologues. The terms “orthologue” (also referred to as “ortholog” herein) and “homologue” (also referred to as “homolog” herein) are well known in the art. By means of further guidance, a “homologue” of a protein as used herein is a protein of the same species which performs the same or a similar function as the protein it is a homologue of Homologous proteins may but need not be structurally related, or are only partially structurally related. An “orthologue” of a protein as used herein is a protein of a different species which performs the same or a similar function as the protein it is an orthologue of. Orthologous proteins may but need not be structurally related, or are only partially structurally related. Homologs and orthologs may be identified by homology modelling (see, e.g., Greer, Science vol. 228 (1985) 1055, and Blundell et al. Eur J Biochem vol 172 (1988), 513) or “structural BLAST” (Dey F, Cliff Zhang Q, Petrey D, Honig B. Toward a “structural BLAST”: using structural relationships to infer function. Protein Sci. 2013 April; 22(4):359-66. doi: 10.1002/pro.2225.). See also Shmakov et al. (2015) for application in the field of CRISPR-Cas loci. Homologous proteins may but need not be structurally related, or are only partially structurally related.

[0264] The C2c1 gene is found in several diverse bacterial genomes, typically in the same locus with cas1, cas2, and cas4 genes and a CRISPR cassette. Thus, the layout of this putative novel CRISPR-Cas system appears to be similar to that of type II-B. Furthermore, similar to Cas9, the C2c1 protein contains an active RuvC-like nuclease, an arginine-rich region, and a Zn finger (absent in Cas9).

[0265] In particular embodiments, the effector protein is a C2c1 effector protein from an organism from a genus comprising Alicyclobacillus, Desulfovibrio, Desulfonatronum, Opitutaceae, Tuberibacillus, Bacillus, Brevibacillus, Candidatus, Desulfatirhabdium, Citrobacter, Elusimicrobia, Methylobacterium, Omnitrophica, Phycisphaerae, Planctomycetes, Spirochaetes, and Verrucomicrobiaceae.

[0266] In further particular embodiments, the C2c1 effector protein is from a species selected from Alicyclobacillus acidoterrestris (e.g., ATCC 49025), Alicyclobacillus contaminans (e.g., DSM 17975), Alicyclobacillus macrosporangiidus (e.g. DSM 17980), Bacillus hisashii strain C4, Candidatus Lindowbacteria bacterium RIFCSPLOWO2, Desulfovibrio inopinatus (e.g., DSM 10711), Desulfonatronum thiodismutans (e.g., strain MLF-1), Elusimicrobia bacterium RIFOXYA12, Omnitrophica WOR_2 bacterium RIFCSPHIGHO2, Opitutaceae bacterium TAV5, Phycisphaerae bacterium ST-NAGAB-D1, Planctomycetes bacterium RBG_13_46_10, Spirochaetes bacterium GWB1_27_13, Verrucomicrobiaceae bacterium UBA2429, Tuberibacillus calidus (e.g., DSM 17572), Bacillus thermoamylovorans (e.g., strain B4166), Brevibacillus sp. CF112, Bacillus sp. NSP2.1, Desulfatirhabdium butyrativorans (e.g., DSM 18734), Alicyclobacillus herbarius (e.g., DSM 13609), Citrobacter freundii (e.g., ATCC 8090), Brevibacillus agri (e.g., BAB-2500), Methylobacterium nodulans (e.g., ORS 2060).

[0267] The effector protein may comprise a chimeric effector protein comprising a first fragment from a first effector protein (e.g., a C2c1) ortholog and a second fragment from a second effector (e.g., a C2c1) protein ortholog, and wherein the first and second effector protein orthologs are different. At least one of the first and second effector protein (e.g., a C2c1) orthologs may comprise an effector protein (e.g., a C2c1) from an organism comprising Alicyclobacillus, Desulfovibrio, Desulfonatronum, Opitutaceae, Tuberibacillus, Bacillus, Brevibacillus, Candidatus, Desulfatirhabdium, Elusimicrobia, Citrobacter, Methylobacterium, Omnitrophicai, Phycisphaerae, Planctomycetes, Spirochaetes, and Verrucomicrobiaceae; e.g., a chimeric effector protein comprising a first fragment and a second fragment wherein each of the first and second fragments is selected from a C2c1 of an organism comprising Alicyclobacillus, Desulfovibrio, Desulfonatronum, Opitutaceae, Tuberibacillus, Bacillus, Brevibacillus, Candidatus, Desulfatirhabdium, Elusimicrobia, Citrobacter, Methylobacterium, Omnitrophicai, Phycisphaerae, Planctomycetes, Spirochaetes, and Verrucomicrobiaceae wherein the first and second fragments are not from the same bacteria; for instance a chimeric effector protein comprising a first fragment and a second fragment wherein each of the first and second fragments is selected from a C2c1 of Alicyclobacillus acidoterrestris (e.g., ATCC 49025), Alicyclobacillus contaminans (e.g., DSM 17975), Alicyclobacillus macrosporangiidus (e.g. DSM 17980), Bacillus hisashii strain C4, Candidatus Lindowbacteria bacterium RIFCSPLOWO2, Desulfovibrio inopinatus (e.g., DSM 10711), Desulfonatronum thiodismutans (e.g., strain MLF-1), Elusimicrobia bacterium RIFOXYA12, Omnitrophica WOR_2 bacterium RIFCSPHIGHO2, Opitutaceae bacterium TAV5, Phycisphaerae bacterium ST-NAGAB-D1, Planctomycetes bacterium RBG_13_46_10, Spirochaetes bacterium GWB1_27_13, Verrucomicrobiaceae bacterium UBA2429, Tuberibacillus calidus (e.g., DSM 17572), Bacillus thermoamylovorans (e.g., strain B4166), Brevibacillus sp. CF112, Bacillus sp. NSP2.1, Desulfatirhabdium butyrativorans (e.g., DSM 18734), Alicyclobacillus herbarius (e.g., DSM 13609), Citrobacter freundii (e.g., ATCC 8090), Brevibacillus agri (e.g., BAB-2500), Methylobacterium nodulans (e.g., ORS 2060), wherein the first and second fragments are not from the same bacteria.

[0268] In a more preferred embodiment, the C2c1p is derived from a bacterial species selected from Alicyclobacillus acidoterrestris (e.g., ATCC 49025), Alicyclobacillus contaminans (e.g., DSM 17975), Alicyclobacillus macrosporangiidus (e.g. DSM 17980), Bacillus hisashii strain C4, Candidatus Lindowbacteria bacterium RIFCSPLOWO2, Desulfovibrio inopinatus (e.g., DSM 10711), Desulfonatronum thiodismutans (e.g., strain MLF-1), Elusimicrobia bacterium RIFOXYA12, Omnitrophica WOR_2 bacterium RIFCSPHIGHO2, Opitutaceae bacterium TAV5, Phycisphaerae bacterium ST-NAGAB-D1, Planctomycetes bacterium RBG_13_46_10, Spirochaetes bacterium GWB1_27_13, Verrucomicrobiaceae bacterium UBA2429, Tuberibacillus calidus (e.g., DSM 17572), Bacillus thermoamylovorans (e.g., strain B4166), Brevibacillus sp. CF112, Bacillus sp. NSP2.1, Desulfatirhabdium butyrativorans (e.g., DSM 18734), Alicyclobacillus herbarius (e.g., DSM 13609), Citrobacter freundii (e.g., ATCC 8090), Brevibacillus agri (e.g., BAB-2500), Methylobacterium nodulans (e.g., ORS 2060). In certain embodiments, the C2c1p is derived from a bacterial species selected from Alicyclobacillus acidoterrestris (e.g., ATCC 49025), Alicyclobacillus contaminans (e.g., DSM 17975).

[0269] In particular embodiments, the homologue or orthologue of C2c1 as referred to herein has a sequence homology or identity of at least 80%, more preferably at least 85%, even more preferably at least 90%, such as for instance at least 95% with C2c1. In further embodiments, the homologue or orthologue of C2c1 as referred to herein has a sequence identity of at least 80%, more preferably at least 85%, even more preferably at least 90%, such as for instance at least 95% with the wild type C2c1. Where the C2c1 has one or more mutations (mutated), the homologue or orthologue of said C2c1 as referred to herein has a sequence identity of at least 80%, more preferably at least 85%, even more preferably at least 90%, such as for instance at least 95% with the mutated C2c1.

[0270] In an embodiment, the C2c1 protein may be an ortholog of an organism of a genus which includes, but is not limited to Alicyclobacillus, Desulfovibrio, Desulfonatronum, Opitutaceae, Tuberibacillus, Bacillus, Brevibacillus, Candidatus, Desulfatirhabdium, Elusimicrobia, Citrobacter, Methylobacterium, Omnitrophicai, Phycisphaerae, Planctomycetes, Spirochaetes, and Verrucomicrobiaceae; in particular embodiments, the type V Cas protein may be an ortholog of an organism of a species which includes, but is not limited to Alicyclobacillus acidoterrestris (e.g., ATCC 49025), Alicyclobacillus contaminans (e.g., DSM 17975), Alicyclobacillus macrosporangiidus (e.g. DSM 17980), Bacillus hisashii strain C4, Candidatus Lindowbacteria bacterium RIFCSPLOWO2, Desulfovibrio inopinatus (e.g., DSM 10711), Desulfonatronum thiodismutans (e.g., strain MLF-1), Elusimicrobia bacterium RIFOXYA12, Omnitrophica WOR_2 bacterium RIFCSPHIGHO2, Opitutaceae bacterium TAV5, Phycisphaerae bacterium ST-NAGAB-D1, Planctomycetes bacterium RBG_13_46_10, Spirochaetes bacterium GWB1_27_13, Verrucomicrobiaceae bacterium UBA2429, Tuberibacillus calidus (e.g., DSM 17572), Bacillus thermoamylovorans (e.g., strain B4166), Brevibacillus sp. CF112, Bacillus sp. NSP2.1, Desulfatirhabdium butyrativorans (e.g., DSM 18734), Alicyclobacillus herbarius (e.g., DSM 13609), Citrobacter freundii (e.g., ATCC 8090), Brevibacillus agri (e.g., BAB-2500), Methylobacterium nodulans (e.g., ORS 2060),In particular embodiments, the homologue or orthologue of C2c1 as referred to herein has a sequence homology or identity of at least 80%, more preferably at least 85%, even more preferably at least 90%, such as for instance at least 95% with one or more of the C2c1 sequences disclosed herein. In further embodiments, the homologue or orthologue of C2c1 as referred to herein has a sequence identity of at least 80%, more preferably at least 85%, even more preferably at least 90%, such as for instance at least 95% with the wild type AacC2c1 or BthC2c1.

[0271] In particular embodiments, the C2c1 protein of the invention has a sequence homology or identity of at least 60%, more particularly at least 70, such as at least 80%, more preferably at least 85%, even more preferably at least 90%, such as for instance at least 95% with AacC2c1 or BthC2c1. In further embodiments, the C2c1 protein as referred to herein has a sequence identity of at least 60%, such as at least 70%, more particularly at least 80%, more preferably at least 85%, even more preferably at least 90%, such as for instance at least 95% with the wild type AacC2c1. In particular embodiments, the C2c1 protein of the present invention has less than 60% sequence identity with AacC2c1. The skilled person will understand that this includes truncated forms of the C2c1 protein whereby the sequence identity is determined over the length of the truncated form.

[0272] In certain methods according to the present invention, the CRISPR-Cas protein is preferably mutated with respect to a corresponding wild-type enzyme such that the mutated CRISPR-Cas protein lacks the ability to cleave one or both DNA strands of a target locus containing a target sequence. In particular embodiments, one or more catalytic domains of the C2c1 protein are mutated to produce a mutated Cas protein which cleaves only one DNA strand of a target sequence.

[0273] In particular embodiments, the CRISPR-Cas protein may be mutated with respect to a corresponding wild-type enzyme such that the mutated CRISPR-Cas protein lacks substantially all DNA cleavage activity. In some embodiments, a CRISPR-Cas protein may be considered to substantially lack all DNA and/or RNA cleavage activity when the cleavage activity of the mutated enzyme is about no more than 25%, 10%, 5%, 1%, 0.1%, 0.01%, or less of the nucleic acid cleavage activity of the non-mutated form of the enzyme; an example can be when the nucleic acid cleavage activity of the mutated form is nil or negligible as compared with the non-mutated form.

[0274] In certain embodiments of the methods provided herein the CRISPR-Cas protein is a mutated CRISPR-Cas protein which cleaves only one DNA strand, i.e. a nickase. More particularly, in the context of the present invention, the nickase ensures cleavage within the non-target sequence, i.e. the sequence which is on the opposite DNA strand of the target sequence and which is 3′ of the PAM sequence. By means of further guidance, and without limitation, an arginine-to-alanine substitution (R911A) in the Nuc domain of C2c1 from Alicyclobacillus acidoterrestris converts C2c1 from a nuclease that cleaves both strands to a nickase (cleaves a single strand). It will be understood by the skilled person that where the enzyme is not AacC2c1, a mutation may be made at a residue in a corresponding position.

[0275] In certain embodiments, the C2c1 protein is a catalytically inactive C2c1 which comprises a mutation in the RuvC domain. In some embodiments, the catalytically inactive C2c1 protein comprises a mutation corresponding to amion acid positions D570, E848, or D977 in Alicyclobacillus acidoterrestris C2c1. In some embodiments, the catalytically inactive C2c1 protein comprises a mutation corresponding to D570A, E848A, or D977A in Alicyclobacillus acidoterrestris C2c1.

[0276] The programmability, specificity, and collateral activity of the RNA-guided C2c1 also make it an ideal switchable nuclease for non-specific cleavage of nucleic acids. In one embodiment, a C2c1 system is engineered to provide and take advantage of collateral non-specific cleavage of RNA. In another embodiment, a C2c1 system is engineered to provide and take advantage of collateral non-specific cleavage of ssDNA. Accordingly, engineered C2c1 systems provide platforms for nucleic acid detection and transcriptome manipulation, and inducing cell death. C2c1 is developed for use as a mammalian transcript knockdown and binding tool. C2c1 is capable of robust collateral cleavage of RNA and ssDNA when activated by sequence-specific targeted DNA binding.

[0277] In certain embodiments, C2c1 is provided or expressed in an in vitro system or in a cell, transiently or stably, and targeted or triggered to non-specifically cleave cellular nucleic acids. In one embodiment, C2c1 is engineered to knock down ssDNA, for example viral ssDNA. In another embodiment, C2c1 is engineered to knock down RNA. The system can be devised such that the knockdown is dependent on a target DNA present in the cell or in vitro system, or triggered by the addition of a target nucleic acid to the system or cell.

[0278] In an embodiment, the C2c1 system is engineered to non-specifically cleave RNA in a subset of cells distinguishable by the presence of an aberrant DNA sequence, for instance where cleavage of the aberrant DNA might be incomplete or ineffectual. In one non-limiting example, a DNA translocation that is present in a cancer cell and drives cell transformation is targeted. Whereas a subpopulation of cells that undergoes chromosomal DNA and repair may survive, non-specific collateral ribonuclease activity advantageously leads to cell death of potential survivors.

[0279] Collateral activity was recently leveraged for a highly sensitive and specific nucleic acid detection platform termed SHERLOCK that is useful for many clinical diagnoses (Gootenberg, J. S. et al. Nucleic acid detection with CRISPR-Cas13a/C2c2. Science 356, 438-442 (2017)).

[0280] According to the invention, engineered C2c1 systems are optimized for DNA or RNA endonuclease activity and can be expressed in mammalian cells and targeted to effectively knock down reporter molecules or transcripts in cells.

### Guide Sequences

[0281] As used herein, the term “guide sequence” and “guide molecule” in the context of a CRISPR-Cas system, comprises any polynucleotide sequence having sufficient complementarity with a target nucleic acid sequence to hybridize with the target nucleic acid sequence and direct sequence-specific binding of a nucleic acid-targeting complex to the target nucleic acid sequence. The guide sequences made using the methods disclosed herein may be a full-length guide sequence, a truncated guide sequence, a full-length sgRNA sequence, a truncated sgRNA sequence, or an E+F sgRNA sequence. In some embodiments, the degree of complementarity of the guide sequence to a given target sequence, when optimally aligned using a suitable alignment algorithm, is about or more than about 50%, 60%, 75%, 80%, 85%, 90%, 95%, 97.5%, 99%, or more. In certain example embodiments, the guide molecule comprises a guide sequence that may be designed to have at least one mismatch with the target sequence, such that a RNA duplex formed between the guide sequence and the target sequence. Accordingly, the degree of complementarity is preferably less than 99%. For instance, where the guide sequence consists of 24 nucleotides, the degree of complementarity is more particularly about 96% or less. In particular embodiments, the guide sequence is designed to have a stretch of two or more adjacent mismatching nucleotides, such that the degree of complementarity over the entire guide sequence is further reduced. For instance, where the guide sequence consists of 24 nucleotides, the degree of complementarity is more particularly about 96% or less, more particularly, about 92% or less, more particularly about 88% or less, more particularly about 84% or less, more particularly about 80% or less, more particularly about 76% or less, more particularly about 72% or less, depending on whether the stretch of two or more mismatching nucleotides encompasses 2, 3, 4, 5, 6 or 7 nucleotides, etc. In some embodiments, aside from the stretch of one or more mismatching nucleotides, the degree of complementarity, when optimally aligned using a suitable alignment algorithm, is about or more than about 50%, 60%, 75%, 80%, 85%, 90%, 95%, 97.5%, 99%, or more. Optimal alignment may be determined with the use of any suitable algorithm for aligning sequences, non-limiting example of which include the Smith-Waterman algorithm, the Needleman-Wunsch algorithm, algorithms based on the Burrows-Wheeler Transform (e.g., the Burrows Wheeler Aligner), ClustalW, Clustal X, BLAT, Novoalign (Novocraft Technologies; available at www.novocraft.com), ELAND (Illumina, San Diego, Calif.), SOAP (available at soap.genomics.org.cn), and Maq (available at maq.sourceforge.net). The ability of a guide sequence (within a nucleic acid-targeting guide RNA) to direct sequence-specific binding of a nucleic acid-targeting complex to a target nucleic acid sequence may be assessed by any suitable assay. For example, the components of a nucleic acid-targeting CRISPR system sufficient to form a nucleic acid-targeting complex, including the guide sequence to be tested, may be provided to a host cell having the corresponding target nucleic acid sequence, such as by transfection with vectors encoding the components of the nucleic acid-targeting complex, followed by an assessment of preferential targeting (e.g., cleavage) within the target nucleic acid sequence, such as by Surveyor assay as described herein. Similarly, cleavage of a target nucleic acid sequence (or a sequence in the vicinity thereof) may be evaluated in a test tube by providing the target nucleic acid sequence, components of a nucleic acid-targeting complex, including the guide sequence to be tested and a control guide sequence different from the test guide sequence, and comparing binding or rate of cleavage at or in the vicinity of the target sequence between the test and control guide sequence reactions. Other assays are possible, and will occur to those skilled in the art. A guide sequence, and hence a nucleic acid-targeting guide RNA may be selected to target any target nucleic acid sequence.

[0282] As used herein, the term “guide sequence,” “crRNA,” “guide RNA,” or “single guide RNA,” or “gRNA” refers to a polynucleotide comprising any polynucleotide sequence having sufficient complementarity with a target nucleic acid sequence to hybridize with the target nucleic acid sequence and to direct sequence-specific binding of a RNA-targeting complex comprising the guide sequence and a CRISPR effector protein to the target nucleic acid sequence. In some example embodiments, the degree of complementarity, when optimally aligned using a suitable alignment algorithm, is about or more than about 50%, 60%, 75%, 80%, 85%, 90%, 95%, 97.5%, 99%, or more. Optimal alignment may be determined with the use of any suitable algorithm for aligning sequences, non-limiting example of which include the Smith-Waterman algorithm, the Needleman-Wunsch algorithm, algorithms based on the Burrows-Wheeler Transform (e.g., the Burrows Wheeler Aligner), ClustalW, Clustal X, BLAT, Novoalign (Novocraft Technologies; available at www.novocraft.com), ELAND (Illumina, San Diego, Calif.), SOAP (available at soap.genomics.org.cn), and Maq (available at maq.sourceforge.net). The ability of a guide sequence (within a nucleic acid-targeting guide RNA) to direct sequence-specific binding of a nucleic acid-targeting complex to a target nucleic acid sequence may be assessed by any suitable assay. For example, the components of a nucleic acid-targeting CRISPR system sufficient to form a nucleic acid-targeting complex, including the guide sequence to be tested, may be provided to a host cell having the corresponding target nucleic acid sequence, such as by transfection with vectors encoding the components of the nucleic acid-targeting complex, followed by an assessment of preferential targeting (e.g., cleavage) within the target nucleic acid sequence, such as by Surveyor assay as described herein. Similarly, cleavage of a target nucleic acid sequence may be evaluated in a test tube by providing the target nucleic acid sequence, components of a nucleic acid-targeting complex, including the guide sequence to be tested and a control guide sequence different from the test guide sequence, and comparing binding or rate of cleavage at the target sequence between the test and control guide sequence reactions. Other assays are possible, and will occur to those skilled in the art. A guide sequence, and hence a nucleic acid-targeting guide may be selected to target any target nucleic acid sequence. The target sequence may be DNA. The target sequence may be any RNA sequence. In some embodiments, the target sequence may be a sequence within a RNA molecule selected from the group consisting of messenger RNA (mRNA), pre-mRNA, ribosomal RNA (rRNA), transfer RNA (tRNA), micro-RNA (miRNA), small interfering RNA (siRNA), small nuclear RNA (snRNA), small nucleolar RNA (snoRNA), double stranded RNA (dsRNA), non-coding RNA (ncRNA), long non-coding RNA (lncRNA), and small cytoplasmatic RNA (scRNA). In some preferred embodiments, the target sequence may be a sequence within a RNA molecule selected from the group consisting of mRNA, pre-mRNA, and rRNA. In some preferred embodiments, the target sequence may be a sequence within a RNA molecule selected from the group consisting of ncRNA, and lncRNA. In some more preferred embodiments, the target sequence may be a sequence within an mRNA molecule or a pre-mRNA molecule.

[0283] In certain embodiments, the guide sequence or spacer length of the guide molecules is from 15 to 50 nt. In certain embodiments, the spacer length of the guide RNA is at least 15 nucleotides. In certain embodiments, the spacer length is from 15 to 17 nt, e.g., 15, 16, or 17 nt, from 17 to 20 nt, e.g., 17, 18, 19, or 20 nt, from 20 to 24 nt, e.g., 20, 21, 22, 23, or 24 nt, from 23 to 25 nt, e.g., 23, 24, or 25 nt, from 24 to 27 nt, e.g., 24, 25, 26, or 27 nt, from 27-30 nt, e.g., 27, 28, 29, or 30 nt, from 30-35 nt, e.g., 30, 31, 32, 33, 34, or 35 nt, or 35 nt or longer. In certain example embodiment, the guide sequence is 15, 16, 17, 18, 19, 20, 21, 22, 23, 24, 25, 26, 27, 28, 29, 30, 31, 32, 33, 34, 35, 36, 37, 38, 39 40, 41, 42, 43, 44, 45, 46, 47 48, 49, 50, 51, 52, 53, 54, 55, 56, 57, 58, 59, 60, 61, 62, 63, 64, 65, 66, 67, 68, 69, 70, 71, 72, 73, 74, 75, 76, 77, 78, 79, 80, 81, 82, 83, 84, 85, 86, 87, 88, 89, 90, 91, 92, 93, 94, 95, 96, 97, 98, 99, or 100 nt.

[0284] In some embodiments, the sequence of the guide molecule (direct repeat and/or spacer) is selected to reduce the degree secondary structure within the guide molecule. In some embodiments, about or less than about 75%, 50%, 40%, 30%, 25%, 20%, 15%, 10%, 5%, 1%, or fewer of the nucleotides of the nucleic acid-targeting guide RNA participate in self-complementary base pairing when optimally folded. Optimal folding may be determined by any suitable polynucleotide folding algorithm. Some programs are based on calculating the minimal Gibbs free energy. An example of one such algorithm is mFold, as described by Zuker and Stiegler (Nucleic Acids Res. 9 (1981), 133-148). Another example folding algorithm is the online webserver RNAfold, developed at Institute for Theoretical Chemistry at the University of Vienna, using the centroid structure prediction algorithm (see e.g., A.R. Gruber et al., 2008, Cell 106(1): 23-24; and PA Carr and GM Church, 2009, Nature Biotechnology 27(12): 1151-62).

[0285] In some embodiments, it is of interest to reduce the susceptibility of the guide molecule to RNA cleavage, such as to cleavage by Cas13. Accordingly, in particular embodiments, the guide molecule is adjusted to avoide cleavage by Cas13 or other RNA-cleaving enzymes.

[0286] In certain embodiments, the guide molecule comprises non-naturally occurring nucleic acids and/or non-naturally occurring nucleotides and/or nucleotide analogs, and/or chemically modifications. Preferably, these non-naturally occurring nucleic acids and non-naturally occurring nucleotides are located outside the guide sequence. Non-naturally occurring nucleic acids can include, for example, mixtures of naturally and non-naturally occurring nucleotides. Non-naturally occurring nucleotides and/or nucleotide analogs may be modified at the ribose, phosphate, and/or base moiety. In an embodiment of the invention, a guide nucleic acid comprises ribonucleotides and non-ribonucleotides. In one such embodiment, a guide comprises one or more ribonucleotides and one or more deoxyribonucleotides. In an embodiment of the invention, the guide comprises one or more non-naturally occurring nucleotide or nucleotide analog such as a nucleotide with phosphorothioate linkage, a locked nucleic acid (LNA) nucleotides comprising a methylene bridge between the 2′ and 4′ carbons of the ribose ring, or bridged nucleic acids (BNA). Other examples of modified nucleotides include 2′-O-methyl analogs, 2′-deoxy analogs, or 2′-fluoro analogs. Further examples of modified bases include, but are not limited to, 2-aminopurine, 5-bromo-uridine, pseudouridine, inosine, 7-methylguanosine. Examples of guide RNA chemical modifications include, without limitation, incorporation of 2′-O-methyl (M), 2′-O-methyl 3′ phosphorothioate (MS), S-constrained ethyl(cEt), or 2′-O-methyl 3′ thioPACE (MSP) at one or more terminal nucleotides. Such chemically modified guides can comprise increased stability and increased activity as compared to unmodified guides, though on-target vs. off-target specificity is not predictable. (See, Hendel, 2015, Nat Biotechnol. 33(9):985-9, doi: 10.1038/nbt.3290, published online 29 Jun. 2015 Ragdarm et al., 0215, PNAS, E7110-E7111; Allerson et al., J. Med. Chem. 2005, 48:901-904; Bramsen et al., Front. Genet., 2012, 3:154; Deng et al., PNAS, 2015, 112:11870-11875; Sharma et al., MedChemComm., 2014, 5:1454-1471; Hendel et al., Nat. Biotechnol. (2015) 33(9): 985-989; Li et al., Nature Biomedical Engineering, 2017, 1, 0066 DOI:10.1038/s41551-017-0066). In some embodiments, the 5′ and/or 3′ end of a guide RNA is modified by a variety of functional moieties including fluorescent dyes, polyethylene glycol, cholesterol, proteins, or detection tags. (See Kelly et al., 2016, J. Biotech. 233:74-83). In certain embodiments, a guide comprises ribonucleotides in a region that binds to a target RNA and one or more deoxyribonucletides and/or nucleotide analogs in a region that binds to Cas13. In an embodiment of the invention, deoxyribonucleotides and/or nucleotide analogs are incorporated in engineered guide structures, such as, without limitation, stem-loop regions, and the seed region. For Cas13 guide, in certain embodiments, the modification is not in the 5′-handle of the stem-loop regions. Chemical modification in the 5′-handle of the stem-loop region of a guide may abolish its function (see Li, et al., Nature Biomedical Engineering, 2017, 1:0066). In certain embodiments, at least 1, 2, 3, 4, 5, 6, 7, 8, 9, 10, 11, 12, 13, 14, 15, 16, 17, 18, 19, 20, 21, 22, 23, 24, 25, 26, 27, 28, 29, 30, 35, 40, 45, 50, or 75 nucleotides of a guide is chemically modified. In some embodiments, 3-5 nucleotides at either the 3′ or the 5′ end of a guide is chemically modified. In some embodiments, only minor modifications are introduced in the seed region, such as 2′-F modifications. In some embodiments, 2′-F modification is introduced at the 3′ end of a guide. In certain embodiments, three to five nucleotides at the 5′ and/or the 3′ end of the guide are chemically modified with 2′-O-methyl (M), 2′-O-methyl 3′ phosphorothioate (MS), S-constrained ethyl(cEt), or 2′-O-methyl 3′ thioPACE (MSP). Such modification can enhance genome editing efficiency (see Hendel et al., Nat. Biotechnol. (2015) 33(9): 985-989). In certain embodiments, all of the phosphodiester bonds of a guide are substituted with phosphorothioates (PS) for enhancing levels of gene disruption. In certain embodiments, more than five nucleotides at the 5′ and/or the 3′ end of the guide are chemically modified with 2′-O-Me, 2′-F or S-constrained ethyl(cEt). Such chemically modified guide can mediate enhanced levels of gene disruption (see Ragdarm et al., 0215, PNAS, E7110-E7111). In an embodiment of the invention, a guide is modified to comprise a chemical moiety at its 3′ and/or 5′ end. Such moieties include, but are not limited to amine, azide, alkyne, thio, dibenzocyclooctyne (DBCO), or Rhodamine. In certain embodiment, the chemical moiety is conjugated to the guide by a linker, such as an alkyl chain. In certain embodiments, the chemical moiety of the modified guide can be used to attach the guide to another molecule, such as DNA, RNA, protein, or nanoparticles. Such chemically modified guide can be used to identify or enrich cells generically edited by a CRISPR system (see Lee et al., eLife, 2017, 6:e25312, DOI:10.7554).

[0287] In some embodiments, a nucleic acid-targeting guide is selected to reduce the degree secondary structure within the nucleic acid-targeting guide. In some embodiments, about or less than about 75%, 50%, 40%, 30%, 25%, 20%, 15%, 10%, 5%, 1%, or fewer of the nucleotides of the nucleic acid-targeting guide participate in self-complementary base pairing when optimally folded. Optimal folding may be determined by any suitable polynucleotide folding algorithm. Some programs are based on calculating the minimal Gibbs free energy. An example of one such algorithm is mFold, as described by Zuker and Stiegler (Nucleic Acids Res. 9 (1981), 133-148). Another example folding algorithm is the online webserver RNAfold, developed at Institute for Theoretical Chemistry at the University of Vienna, using the centroid structure prediction algorithm (see e.g., A.R. Gruber et al., 2008, Cell 106(1): 23-24; and PA Carr and GM Church, 2009, Nature Biotechnology 27(12): 1151-62).

[0288] In certain embodiments, a guide RNA or crRNA may comprise, consist essentially of, or consist of a direct repeat (DR) sequence and a guide sequence or spacer sequence. In certain embodiments, the guide RNA or crRNA may comprise, consist essentially of, or consist of a direct repeat sequence fused or linked to a guide sequence or spacer sequence. In certain embodiments, the direct repeat sequence may be located upstream (i.e., 5′) from the guide sequence or spacer sequence. In other embodiments, the direct repeat sequence may be located downstream (i.e., 3′) from the guide sequence or spacer sequence.

[0289] In certain embodiments, the crRNA comprises a stem loop, preferably a single stem loop. In certain embodiments, the direct repeat sequence forms a stem loop, preferably a single stem loop.

[0290] In certain embodiments, the spacer length of the guide RNA is from 15 to 35 nt. In certain embodiments, the spacer length of the guide RNA is at least 15 nucleotides. In certain embodiments, the spacer length is from 15 to 17 nt, e.g., 15, 16, or 17 nt, from 17 to 20 nt, e.g., 17, 18, 19, or 20 nt, from 20 to 24 nt, e.g., 20, 21, 22, 23, or 24 nt, from 23 to 25 nt, e.g., 23, 24, or 25 nt, from 24 to 27 nt, e.g., 24, 25, 26, or 27 nt, from 27-30 nt, e.g., 27, 28, 29, or 30 nt, from 30-35 nt, e.g., 30, 31, 32, 33, 34, or 35 nt, or 35 nt or longer.

[0291] In general, the CRISPR-Cas, CRISPR-Cas9 or CRISPR system may be as used in the foregoing documents, such as WO 2014/093622 (PCT/US2013/074667) and refers collectively to transcripts and other elements involved in the expression of or directing the activity of CRISPR-associated (“Cas”) genes, including sequences encoding a Cas gene, in particular a Cas9 gene in the case of CRISPR-Cas9, a tracr (trans-activating CRISPR) sequence (e.g. tracrRNA or an active partial tracrRNA), a tracr-mate sequence (encompassing a “direct repeat” and a tracrRNA-processed partial direct repeat in the context of an endogenous CRISPR system), a guide sequence (also referred to as a “spacer” in the context of an endogenous CRISPR system), or “RNA(s)” as that term is herein used (e.g., RNA(s) to guide Cas9, e.g. CRISPR RNA and transactivating (tracr) RNA or a single guide RNA (sgRNA) (chimeric RNA)) or other sequences and transcripts from a CRISPR locus. In general, a CRISPR system is characterized by elements that promote the formation of a CRISPR complex at the site of a target sequence (also referred to as a protospacer in the context of an endogenous CRISPR system). In the context of formation of a CRISPR complex, “target sequence” refers to a sequence to which a guide sequence is designed to have complementarity, where hybridization between a target sequence and a guide sequence promotes the formation of a CRISPR complex. The section of the guide sequence through which complementarity to the target sequence is important for cleavage activity is referred to herein as the seed sequence. A target sequence may comprise any polynucleotide, such as DNA or RNA polynucleotides. In some embodiments, a target sequence is located in the nucleus or cytoplasm of a cell, and may include nucleic acids in or from mitochondrial, organelles, vesicles, liposomes or particles present within the cell. In some embodiments, especially for non-nuclear uses, NLSs are not preferred. In some embodiments, a CRISPR system comprises one or more nuclear exports signals (NESs). In some embodiments, a CRISPR system comprises one or more NLSs and one or more NESs. In some embodiments, direct repeats may be identified in silico by searching for repetitive motifs that fulfill any or all of the following criteria: 1. found in a 2 Kb window of genomic sequence flanking the type II CRISPR locus; 2. span from 20 to 50 bp; and 3. interspaced by 20 to 50 bp. In some embodiments, 2 of these criteria may be used, for instance 1 and 2, 2 and 3, or 1 and 3. In some embodiments, all 3 criteria may be used.

[0292] In embodiments of the invention the terms guide sequence and guide RNA, i.e. RNA capable of guiding Cas to a target genomic locus, are used interchangeably as in foregoing cited documents such as WO 2014/093622 (PCT/US2013/074667). In general, a guide sequence is any polynucleotide sequence having sufficient complementarity with a target polynucleotide sequence to hybridize with the target sequence and direct sequence-specific binding of a CRISPR complex to the target sequence. In some embodiments, the degree of complementarity between a guide sequence and its corresponding target sequence, when optimally aligned using a suitable alignment algorithm, is about or more than about 50%, 60%, 75%, 80%, 85%, 90%, 95%, 97.5%, 99%, or more. Optimal alignment may be determined with the use of any suitable algorithm for aligning sequences, non-limiting example of which include the Smith-Waterman algorithm, the Needleman-Wunsch algorithm, algorithms based on the Burrows-Wheeler Transform (e.g. the Burrows Wheeler Aligner), ClustalW, Clustal X, BLAT, Novoalign (Novocraft Technologies; available at www.novocraft.com), ELAND (Illumina, San Diego, Calif.), SOAP (available at soap.genomics.org.cn), and Maq (available at maq.sourceforge.net). In some embodiments, a guide sequence is about or more than about 5, 10, 11, 12, 13, 14, 15, 16, 17, 18, 19, 20, 21, 22, 23, 24, 25, 26, 27, 28, 29, 30, 35, 40, 45, 50, 75, or more nucleotides in length. In some embodiments, a guide sequence is less than about 75, 50, 45, 40, 35, 30, 25, 20, 15, 12, or fewer nucleotides in length. Preferably the guide sequence is 10 30 nucleotides long. The ability of a guide sequence to direct sequence-specific binding of a CRISPR complex to a target sequence may be assessed by any suitable assay. For example, the components of a CRISPR system sufficient to form a CRISPR complex, including the guide sequence to be tested, may be provided to a host cell having the corresponding target sequence, such as by transfection with vectors encoding the components of the CRISPR sequence, followed by an assessment of preferential cleavage within the target sequence, such as by Surveyor assay as described herein. Similarly, cleavage of a target polynucleotide sequence may be evaluated in a test tube by providing the target sequence, components of a CRISPR complex, including the guide sequence to be tested and a control guide sequence different from the test guide sequence, and comparing binding or rate of cleavage at the target sequence between the test and control guide sequence reactions. Other assays are possible, and will occur to those skilled in the art.

[0293] In some embodiments of CRISPR-Cas systems, the degree of complementarity between a guide sequence and its corresponding target sequence can be about or more than about 50%, 60%, 75%, 80%, 85%, 90%, 95%, 97.5%, 99%, or 100%; a guide or RNA or sgRNA can be about or more than about 5, 10, 11, 12, 13, 14, 15, 16, 17, 18, 19, 20, 21, 22, 23, 24, 25, 26, 27, 28, 29, 30, 35, 40, 45, 50, 75, or more nucleotides in length; or guide or RNA or sgRNA can be less than about 75, 50, 45, 40, 35, 30, 25, 20, 15, 12, or fewer nucleotides in length; and advantageously tracr RNA is 30 or 50 nucleotides in length. However, an aspect of the invention is to reduce off-target interactions, e.g., reduce the guide interacting with a target sequence having low complementarity. Indeed, in the examples, it is shown that the invention involves mutations that result in the CRISPR-Cas system being able to distinguish between target and off-target sequences that have greater than 80% to about 95% complementarity, e.g., 83%-84% or 88-89% or 94-95% complementarity (for instance, distinguishing between a target having 18 nucleotides from an off-target of 18 nucleotides having 1, 2 or 3 mismatches). Accordingly, in the context of the present invention the degree of complementarity between a guide sequence and its corresponding target sequence is greater than 94.5% or 95% or 95.5% or 96% or 96.5% or 97% or 97.5% or 98% or 98.5% or 99% or 99.5% or 99.9%, or 100%. Off target is less than 100% or 99.9% or 99.5% or 99% or 99% or 98.5% or 98% or 97.5% or 97% or 96.5% or 96% or 95.5% or 95% or 94.5% or 94% or 93% or 92% or 91% or 90% or 89% or 88% or 87% or 86% or 85% or 84% or 83% or 82% or 81% or 80% complementarity between the sequence and the guide, with it advantageous that off target is 100% or 99.9% or 99.5% or 99% or 99% or 98.5% or 98% or 97.5% or 97% or 96.5% or 96% or 95.5% or 95% or 94.5% complementarity between the sequence and the guide.

[0294] Guide Modifications

[0295] In certain embodiments, guides of the invention comprise non-naturally occurring nucleic acids and/or non-naturally occurring nucleotides and/or nucleotide analogs, and/or chemical modifications. Non-naturally occurring nucleic acids can include, for example, mixtures of naturally and non-naturally occurring nucleotides. Non-naturally occurring nucleotides and/or nucleotide analogs may be modified at the ribose, phosphate, and/or base moiety. In an embodiment of the invention, a guide nucleic acid comprises ribonucleotides and non-ribonucleotides. In one such embodiment, a guide comprises one or more ribonucleotides and one or more deoxyribonucleotides. In an embodiment of the invention, the guide comprises one or more non-naturally occurring nucleotide or nucleotide analog such as a nucleotide with phosphorothioate linkage, boranophosphate linkage, a locked nucleic acid (LNA) nucleotides comprising a methylene bridge between the 2′ and 4′ carbons of the ribose ring, or bridged nucleic acids (BNA). Other examples of modified nucleotides include 2′-O-methyl analogs, 2′-deoxy analogs, 2-thiouridine analogs, N6-methyladenosine analogs, or 2′-fluoro analogs. Further examples of modified bases include, but are not limited to, 2-aminopurine, 5-bromo-uridine, pseudouridine (Ψ), N1-methylpseudouridine (mePP), 5-methoxyuridine (5moU), inosine, 7-methylguanosine. Examples of guide RNA chemical modifications include, without limitation, incorporation of 2′-O-methyl (M), 2′-O-methyl-3′-phosphorothioate (MS), phosphorothioate (PS), S-constrained ethyl(cEt), or 2′-O-methyl-3′-thioPACE (MSP) at one or more terminal nucleotides. Such chemically modified guides can comprise increased stability and increased activity as compared to unmodified guides, though on-target vs. off-target specificity is not predictable. (See, Hendel, 2015, Nat Biotechnol. 33(9):985-9, doi: 10.1038/nbt.3290, published online 29 Jun. 2015; Ragdarm et al., 0215, PNAS, E7110-E7111; Allerson et al., J. Med. Chem. 2005, 48:901-904; Bramsen et al., Front. Genet., 2012, 3:154; Deng et al., PNAS, 2015, 112:11870-11875; Sharma et al., MedChemComm., 2014, 5:1454-1471; Hendel et al., Nat. Biotechnol. (2015) 33(9): 985-989; Li et al., Nature Biomedical Engineering, 2017, 1, 0066 DOI:10.1038/s41551-017-0066). In some embodiments, the 5′ and/or 3′ end of a guide RNA is modified by a variety of functional moieties including fluorescent dyes, polyethylene glycol, cholesterol, proteins, or detection tags. (See Kelly et al., 2016, J. Biotech. 233:74-83). In certain embodiments, a guide comprises ribonucleotides in a region that binds to a target DNA and one or more deoxyribonucleotides and/or nucleotide analogs in a region that binds to Cas9, Cpf1, or C2c1. In an embodiment of the invention, deoxyribonucleotides and/or nucleotide analogs are incorporated in engineered guide structures, such as, without limitation, 5′ and/or 3′ end, stem-loop regions, and the seed region. In certain embodiments, the modification is not in the 5′-handle of the stem-loop regions. Chemical modification in the 5′-handle of the stem-loop region of a guide may abolish its function (see Li, et al., Nature Biomedical Engineering, 2017, 1:0066). In certain embodiments, at least 1, 2, 3, 4, 5, 6, 7, 8, 9, 10, 11, 12, 13, 14, 15, 16, 17, 18, 19, 20, 21, 22, 23, 24, 25, 26, 27, 28, 29, 30, 35, 40, 45, 50, or 75 nucleotides of a guide is chemically modified. In some embodiments, 3-5 nucleotides at either the 3′ or the 5′ end of a guide is chemically modified. In some embodiments, only minor modifications are introduced in the seed region, such as 2′-F modifications. In some embodiments, 2′-F modification is introduced at the 3′ end of a guide. In certain embodiments, three to five nucleotides at the 5′ and/or the 3′ end of the guide are chemically modified with 2′-O-methyl (M), 2′-O-methyl-3′-phosphorothioate (MS), S-constrained ethyl(cEt), or 2′-O-methyl-3′-thioPACE (MSP). Such modification can enhance genome editing efficiency (see Hendel et al., Nat. Biotechnol. (2015) 33(9): 985-989). In certain embodiments, all of the phosphodiester bonds of a guide are substituted with phosphorothioates (PS) for enhancing levels of gene disruption. In certain embodiments, more than five nucleotides at the 5′ and/or the 3′ end of the guide are chemically modified with 2′-O-Me, 2′-F or S-constrained ethyl(cEt). Such chemically modified guide can mediate enhanced levels of gene disruption (see Ragdarm et al., 0215, PNAS, E7110-E7111). In an embodiment of the invention, a guide is modified to comprise a chemical moiety at its 3′ and/or 5′ end. Such moieties include, but are not limited to amine, azide, alkyne, thio, dibenzocyclooctyne (DBCO), or Rhodamine. In certain embodiment, the chemical moiety is conjugated to the guide by a linker, such as an alkyl chain. In certain embodiments, the chemical moiety of the modified guide can be used to attach the guide to another molecule, such as DNA, RNA, protein, or nanoparticles. Such chemically modified guide can be used to identify or enrich cells generically edited by a CRISPR system (see Lee et al., eLife, 2017, 6:e25312, DOI:10.7554).

[0296] In certain embodiments, the CRISPR system as provided herein can make use of a crRNA or analogous polynucleotide comprising a guide sequence, wherein the polynucleotide is an RNA, a DNA or a mixture of RNA and DNA, and/or wherein the polynucleotide comprises one or more nucleotide analogs. The sequence can comprise any structure, including but not limited to a structure of a native crRNA, such as a bulge, a hairpin or a stem loop structure. In certain embodiments, the polynucleotide comprising the guide sequence forms a duplex with a second polynucleotide sequence which can be an RNA or a DNA sequence.

[0297] In certain embodiments, use is made of chemically modified guide RNAs. Examples of guide RNA chemical modifications include, without limitation, incorporation of 2′-O-methyl (M), 2′-O-methyl 3′phosphorothioate (MS), or 2′-O-methyl 3′thioPACE (MSP) at one or more terminal nucleotides. Such chemically modified guide RNAs can comprise increased stability and increased activity as compared to unmodified guide RNAs, though on-target vs. off-target specificity is not predictable. (See, Hendel, 2015, Nat Biotechnol. 33(9):985-9, doi: 10.1038/nbt.3290, published online 29 Jun. 2015). Chemically modified guide RNAs further include, without limitation, RNAs with phosphorothioate linkages and locked nucleic acid (LNA) nucleotides comprising a methylene bridge between the 2′ and 4′ carbons of the ribose ring.

[0298] In some embodiments, a guide sequence is about or more than about 5, 10, 11, 12, 13, 14, 15, 16, 17, 18, 19, 20, 21, 22, 23, 24, 25, 26, 27, 28, 29, 30, 35, 40, 45, 50, 75, or more nucleotides in length. In some embodiments, a guide sequence is less than about 75, 50, 45, 40, 35, 30, 25, 20, 15, 12, or fewer nucleotides in length. Preferably the guide sequence is 10 to 30 nucleotides long. The ability of a guide sequence to direct sequence-specific binding of a CRISPR complex to a target sequence may be assessed by any suitable assay. For example, the components of a CRISPR system sufficient to form a CRISPR complex, including the guide sequence to be tested, may be provided to a host cell having the corresponding target sequence, such as by transfection with vectors encoding the components of the CRISPR sequence, followed by an assessment of preferential cleavage within the target sequence, such as by Surveyor assay. Similarly, cleavage of a target RNA may be evaluated in a test tube by providing the target sequence, components of a CRISPR complex, including the guide sequence to be tested and a control guide sequence different from the test guide sequence, and comparing binding or rate of cleavage at the target sequence between the test and control guide sequence reactions. Other assays are possible, and will occur to those skilled in the art.

[0299] In some embodiments, the modification to the guide is a chemical modification, an insertion, a deletion or a split. In some embodiments, the chemical modification includes, but is not limited to, incorporation of 2′-O-methyl (M) analogs, 2′-deoxy analogs, 2-thiouridine analogs, N6-methyladenosine analogs, 2′-fluoro analogs, 2-aminopurine, 5-bromo-uridine, pseudouridine (Ψ), N1-methylpseudouridine (mePP), 5-methoxyuridine (5moU), inosine, 7-methylguanosine, 2′-O-methyl-3′-phosphorothioate (MS), S-constrained ethyl(cEt), phosphorothioate (PS), or 2′-O-methyl-3′-thioPACE (MSP). In some embodiments, the guide comprises one or more of phosphorothioate modifications. In certain embodiments, at least 1, 2, 3, 4, 5, 6, 7, 8, 9, 10, 11, 12, 13, 14, 15, 16, 17, 18, 19, 20, or 25 nucleotides of the guide are chemically modified. In certain embodiments, one or more nucleotides in the seed region are chemically modified. In certain embodiments, one or more nucleotides in the 3′-terminus are chemically modified. In certain embodiments, none of the nucleotides in the 5′-handle is chemically modified. In some embodiments, the chemical modification in the seed region is a minor modification, such as incorporation of a 2′-fluoro analog. In a specific embodiment, one nucleotide of the seed region is replaced with a 2′-fluoro analog. In some embodiments, 5 or 10 nucleotides in the 3′-terminus are chemically modified. Such chemical modifications at the 3′-terminus of the Cpf1 CrRNA improve gene cutting efficiency (see Li, et al., Nature Biomedical Engineering, 2017, 1:0066). In a specific embodiment, 5 nucleotides in the 3′-terminus are replaced with 2′-fluoro analogues. In a specific embodiment, 10 nucleotides in the 3′-terminus are replaced with 2′-fluoro analogues. In a specific embodiment, 5 nucleotides in the 3′-terminus are replaced with 2′-O-methyl (M) analogs.

[0300] In some embodiments, the loop of the 5′-handle of the guide is modified. In some embodiments, the loop of the 5′-handle of the guide is modified to have a deletion, an insertion, a split, or chemical modifications. In certain embodiments, the loop comprises 3, 4, or 5 nucleotides. In certain embodiments, the loop comprises the sequence of UCUU, UUUU, UAUU, or UGUU.

[0301] A guide sequence, and hence a nucleic acid-targeting guide RNA may be selected to target any target nucleic acid sequence. In the context of formation of a CRISPR complex, “target sequence” refers to a sequence to which a guide sequence is designed to have complementarity, where hybridization between a target sequence and a guide sequence promotes the formation of a CRISPR complex. A target sequence may comprise RNA polynucleotides. The term “target RNA” refers to a RNA polynucleotide being or comprising the target sequence. In other words, the target RNA may be a RNA polynucleotide or a part of a RNA polynucleotide to which a part of the gRNA, i.e. the guide sequence, is designed to have complementarity and to which the effector function mediated by the complex comprising CRISPR effector protein and a gRNA is to be directed. In some embodiments, a target sequence is located in the nucleus or cytoplasm of a cell. The target sequence may be DNA. The target sequence may be any RNA sequence. In some embodiments, the target sequence may be a sequence within a RNA molecule selected from the group consisting of messenger RNA (mRNA), pre-mRNA, ribosomal RNA (rRNA), transfer RNA (tRNA), micro-RNA (miRNA), small interfering RNA (siRNA), small nuclear RNA (snRNA), small nuclear RNA (snoRNA), double stranded RNA (dsRNA), non coding RNA (ncRNA), long non-coding RNA (lncRNA), and small cytoplasmic RNA (scRNA). In some preferred embodiments, the target sequence may be a sequence within a RNA molecule selected from the group consisting of mRNA, pre-mRNA, and rRNA. In some preferred embodiments, the target sequence may be a sequence within a RNA molecule selected from the group consisting of ncRNA, and lncRNA. In some more preferred embodiments, the target sequence may be a sequence within an mRNA molecule or a pre-mRNA molecule.

[0302] In certain embodiments, the spacer length of the guide RNA is less than 28 nucleotides. In certain embodiments, the spacer length of the guide RNA is at least 18 nucleotides and less than 28 nucleotides. In certain embodiments, the spacer length of the guide RNA is between 19 and 28 nucleotides. In certain embodiments, the spacer length of the guide RNA is between 19 and 25 nucleotides. In certain embodiments, the spacer length of the guide RNA is 20 nucleotides. In certain embodiments, the spacer length of the guide RNA is 23 nucleotides. In certain embodiments, the spacer length of the guide RNA is 25 nucleotides.

[0303] In certain embodiments, modulations of cleavage efficiency can be exploited by introduction of mismatches, e.g. 1 or more mismatches, such as 1 or 2 mismatches between spacer sequence and target sequence, including the position of the mismatch along the spacer/target. The more central (i.e. not 3′ or 5′) for instance a double mismatch is, the more cleavage efficiency is affected. Accordingly, by choosing mismatch position along the spacer, cleavage efficiency can be modulated. By means of example, if less than 100% cleavage of targets is desired (e.g. in a cell population), 1 or more, such as preferably 2 mismatches between spacer and target sequence may be introduced in the spacer sequences. The more central along the spacer of the mismatch position, the lower the cleavage percentage.

[0304] In certain example embodiments, the cleavage efficiency may be exploited to design single guides that can distinguish two or more targets that vary by a single nucleotide, such as a single nucleotide polymorphism (SNP), variation, or (point) mutation. The CRISPR effector may have reduced sensitivity to SNPs (or other single nucleotide variations) and continue to cleave SNP targets with a certain level of efficiency. Thus, for two targets, or a set of targets, a guide RNA may be designed with a nucleotide sequence that is complementary to one of the targets i.e. the on-target SNP. The guide RNA is further designed to have a synthetic mismatch. As used herein a “synthetic mismatch” refers to a non-naturally occurring mismatch that is introduced upstream or downstream of the naturally occurring SNP, such as at most 5 nucleotides upstream or downstream, for instance 4, 3, 2, or 1 nucleotide upstream or downstream, preferably at most 3 nucleotides upstream or downstream, more preferably at most 2 nucleotides upstream or downstream, most preferably 1 nucleotide upstream or downstream (i.e. adjacent the SNP). When the CRISPR effector binds to the on-target SNP, only a single mismatch will be formed with the synthetic mismatch and the CRISPR effector will continue to be activated and a detectable signal produced. When the guide RNA hybridizes to an off-target SNP, two mismatches will be formed, the mismatch from the SNP and the synthetic mismatch, and no detectable signal generated. Thus, the systems disclosed herein may be designed to distinguish SNPs within a population. For, example the systems may be used to distinguish pathogenic strains that differ by a single SNP or detect certain disease specific SNPs, such as but not limited to, disease associated SNPs, such as without limitation cancer associated SNPs.

[0305] In certain embodiments, the guide RNA is designed such that the SNP is located on position 1, 2, 3, 4, 5, 6, 7, 8, 9, 10, 11, 12, 13, 14, 15, 16, 17, 18, 19, 20, 21, 22, 23, 24, 25, 26, 27, 28, 29, or 30 of the spacer sequence (starting at the 5′ end). In certain embodiments, the guide RNA is designed such that the SNP is located on position 1, 2, 3, 4, 5, 6, 7, 8, or 9 of the spacer sequence (starting at the 5′ end). In certain embodiments, the guide RNA is designed such that the SNP is located on position 2, 3, 4, 5, 6, or 7 of the spacer sequence (starting at the 5′ end). In certain embodiments, the guide RNA is designed such that the SNP is located on position 3, 4, 5, or 6 of the spacer sequence (starting at the 5′ end). In certain embodiments, the guide RNA is designed such that the SNP is located on position 3 of the spacer sequence (starting at the 5′ end).

[0306] In certain embodiments, the guide RNA is designed such that the mismatch (e.g. the synthetic mismatch, i.e. an additional mutation besides a SNP) is located on position 1, 2, 3, 4, 5, 6, 7, 8, 9, 10, 11, 12, 13, 14, 15, 16, 17, 18, 19, 20, 21, 22, 23, 24, 25, 26, 27, 28, 29, or 30 of the spacer sequence (starting at the 5′ end). In certain embodiments, the guide RNA is designed such that the mismatch is located on position 1, 2, 3, 4, 5, 6, 7, 8, or 9 of the spacer sequence (starting at the 5′ end). In certain embodiments, the guide RNA is designed such that the mismatch is located on position 4, 5, 6, or 7 of the spacer sequence (starting at the 5′ end. In certain embodiments, the guide RNA is designed such that the mismatch is located at position 3, 4, 5, or 6 of the spacer, preferably position 3. In certain embodiments, the guide RNA is designed such that the mismatch is located on position 5 of the spacer sequence (starting at the 5′ end).

[0307] In certain embodiments, said mismatch is 1, 2, 3, 4, or 5 nucleotides upstream or downstream, preferably 2 nucleotides, preferably downstream of said SNP or other single nucleotide variation in said guide RNA.

[0308] In certain embodiments, the guide RNA is designed such that the mismatch is located 2 nucleotides upstream of the SNP (i.e. one intervening nucleotide).

[0309] In certain embodiments, the guide RNA is designed such that the mismatch is located 2 nucleotides downstream of the SNP (i.e. one intervening nucleotide).

[0310] In certain embodiments, the guide RNA is designed such that the mismatch is located on position 5 of the spacer sequence (starting at the 5′ end) and the SNP is located on position 3 of the spacer sequence (starting at the 5′ end).

[0311] In certain embodiments, the guide RNA comprises a spacer which is truncated relative to a wild type spacer. In certain embodiments, the guide RNA comprises a spacer which comprises less than 28 nucleotides, preferably between and including 20 to 27 nucleotides.

[0312] In certain embodiments, the guide RNA comprises a spacer which consists of 20-25 nucleotides or 20-23 nucleotides, such as preferably 20 or 23 nucleotides.

[0313] In certain embodiments, the one or more guide RNAs are designed to detect a single nucleotide polymorphism in a target RNA or DNA, or a splice variant of an RNA transcript.

[0314] In certain embodiments, the one or more guide RNAs may be designed to bind to one or more target molecules that are diagnostic for a disease state. In some embodiments, the disease may be cancer. In some embodiments, the disease state may be an autoimmune disease. In some embodiments, the disease state may be an infection. In some embodiments, the infection may be caused by a virus, a bacterium, a fungus, a protozoa, or a parasite. In specific embodiments, the infection is a viral infection. In specific embodiments, the viral infection is caused by a DNA virus.

[0315] The embodiments described herein comprehend inducing one or more nucleotide modifications in a eukaryotic cell (in vitro, i.e. in an isolated eukaryotic cell) as herein discussed comprising delivering to cell a vector as herein discussed. The mutation(s) can include the introduction, deletion, or substitution of one or more nucleotides at each target sequence of cell(s) via the guide(s) RNA(s). The mutations can include the introduction, deletion, or substitution of 1-75 nucleotides at each target sequence of said cell(s) via the guide(s) RNA(s). The mutations can include the introduction, deletion, or substitution of 1, 5, 10, 11, 12, 13, 14, 15, 16, 17, 18, 19, 20, 21, 22, 23, 24, 25, 26, 27, 28, 29, 30, 35, 40, 45, 50, or 75 nucleotides at each target sequence of said cell(s) via the guide(s) RNA(s). The mutations can include the introduction, deletion, or substitution of 5, 10, 11, 12, 13, 14, 15, 16, 17, 18, 19, 20, 21, 22, 23, 24, 25, 26, 27, 28, 29, 30, 35, 40, 45, 50, or 75 nucleotides at each target sequence of said cell(s) via the guide(s) RNA(s). The mutations include the introduction, deletion, or substitution of 10, 11, 12, 13, 14, 15, 16, 17, 18, 19, 20, 21, 22, 23, 24, 25, 26, 27, 28, 29, 30, 35, 40, 45, 50, or 75 nucleotides at each target sequence of said cell(s) via the guide(s) RNA(s). The mutations can include the introduction, deletion, or substitution of 20, 21, 22, 23, 24, 25, 26, 27, 28, 29, 30, 35, 40, 45, 50, or 75 nucleotides at each target sequence of said cell(s) via the guide(s) RNA(s). The mutations can include the introduction, deletion, or substitution of 40, 45, 50, 75, 100, 200, 300, 400 or 500 nucleotides at each target sequence of said cell(s) via the guide(s) RNA(s).

[0316] Typically, in the context of an endogenous CRISPR system, formation of a CRISPR complex (comprising a guide sequence hybridized to a target sequence and complexed with one or more Cas proteins) results in cleavage in or near (e.g. within 1, 2, 3, 4, 5, 6, 7, 8, 9, 10, 20, 50, or more base pairs from) the target sequence, but may depend on for instance secondary structure, in particular in the case of RNA targets.

[0317] Example orthologs are provided in Table 8 below.

TABLE 8
Host

Alicyclobacillus macrosporangiidus strain DSM 17980 (SEQ ID NO: 301)
Bacillus hisashii strain C4 (SEQ ID NO: 302)
Candidates Lindowbacteria bacterium RIFCSPLOWO2 (SEQ ID NO: 303)
Elusimicrobia bacterium RIFOXYA12 (SEQ ID NO: 304)
Omnitrophica WOR_2 bacterium RIFCSPHIGHO2 (SEQ ID NO: 305)
Phycisphaerae bacterium ST-NAGAB-D1 (SEQ ID NO: 306)
Planctomycetes bacterium RBG_13_46_10 (SEQ ID NO: 307)
Spirochaetes bacterium GWB1_27_13 (SEQ ID NO: 308)
Verrucomicrobiaceae bacterium UBA2429(SEQ ID NO: 309)

### Detection Constructs

[0318] As used herein, a “detection construct” refers to a molecule that can be cleaved or otherwise deactivated by an activated CRISPR system effector protein described herein. The term “detection construct” may also be referred to in the alternative as a “masking construct.” Depending on the nuclease activity of the CRISPR effector protein, the masking construct may be a RNA-based masking construct or a DNA-based masking construct. The Nucleic Acid-based masking constructs comprises a nucleic acid element that is cleavable by a CRISPR effector protein. Cleavage of the nucleic acid element releases agents or produces conformational changes that allow a detectable signal to be produced. Example constructs demonstrating how the nucleic acid element may be used to prevent or mask generation of detectable signal are described below and embodiments of the invention comprise variants of the same. Prior to cleavage, or when the masking construct is in an ‘active’ state, the masking construct blocks the generation or detection of a positive detectable signal. It will be understood that in certain example embodiments a minimal background signal may be produced in the presence of an active masking construct. A positive detectable signal may be any signal that can be detected using optical, fluorescent, chemiluminescent, electrochemical or other detection methods known in the art. The term “positive detectable signal” is used to differentiate from other detectable signals that may be detectable in the presence of the masking construct. For example, in certain embodiments a first signal may be detected when the masking agent is present (i.e. a negative detectable signal), which then converts to a second signal (e.g. the positive detectable signal) upon detection of the target molecules and cleavage or deactivation of the masking agent by the activated CRISPR effector protein.

[0319] In certain example embodiments, the masking construct may comprise a HCR initiator sequence and a cutting motif, or a cleavable structural element, such as a loop or hairpin, that prevents the initiator from initiating the HCR reaction. The cutting motif may be preferentially cut by one of the activated CRISPR effector proteins. Upon cleavage of the cutting motif or structure element by an activated CRISPR effector protein, the initiator is then released to trigger the HCR reaction, detection thereof indicating the presence of one or more targets in the sample. In certain example embodiments, the masking construct comprises a hairpin with a RNA loop. When an activated CRISPR effector protein cuts the RNA loop, the initiator can be released to trigger the HCR reaction.

[0320] In certain example embodiments, the masking construct may suppress generation of a gene product. The gene product may be encoded by a reporter construct that is added to the sample. The masking construct may be an interfering RNA involved in a RNA interference pathway, such as a short hairpin RNA (shRNA) or small interfering RNA (siRNA). The masking construct may also comprise microRNA (miRNA). While present, the masking construct suppresses expression of the gene product. The gene product may be a fluorescent protein or other RNA transcript or proteins that would otherwise be detectable by a labeled probe, aptamer, or antibody but for the presence of the masking construct. Upon activation of the effector protein the masking construct is cleaved or otherwise silenced allowing for expression and detection of the gene product as the positive detectable signal.

[0321] In specific embodiments, the masking construct comprises a silencing RNA that suppresses generation of a gene product encoded by a reporting construct, wherein the gene product generates the detectable positive signal when expressed.

[0322] In certain example embodiments, the masking construct may sequester one or more reagents needed to generate a detectable positive signal such that release of the one or more reagents from the masking construct results in generation of the detectable positive signal. The one or more reagents may combine to produce a colorimetric signal, a chemiluminescent signal, a fluorescent signal, or any other detectable signal and may comprise any reagents known to be suitable for such purposes. In certain example embodiments, the one or more reagents are sequestered by RNA aptamers that bind the one or more reagents. The one or more reagents are released when the effector protein is activated upon detection of a target molecule and the RNA or DNA aptamers are degraded.

[0323] In certain example embodiments, the masking construct may be immobilized on a solid substrate in an individual discrete volume (defined further below) and sequesters a single reagent. For example, the reagent may be a bead comprising a dye. When sequestered by the immobilized reagent, the individual beads are too diffuse to generate a detectable signal, but upon release from the masking construct are able to generate a detectable signal, for example by aggregation or simple increase in solution concentration. In certain example embodiments, the immobilized masking agent is a RNA- or DNA-based aptamer that can be cleaved by the activated effector protein upon detection of a target molecule.

[0324] In certain other example embodiments, the masking construct binds to an immobilized reagent in solution thereby blocking the ability of the reagent to bind to a separate labeled binding partner that is free in solution. Thus, upon application of a washing step to a sample, the labeled binding partner can be washed out of the sample in the absence of a target molecule. However, if the effector protein is activated, the masking construct is cleaved to a degree sufficient to interfere with the ability of the masking construct to bind the reagent thereby allowing the labeled binding partner to bind to the immobilized reagent. Thus, the labeled binding partner remains after the wash step indicating the presence of the target molecule in the sample. In certain aspects, the masking construct that binds the immobilized reagent is a DNA or RNA aptamer. The immobilized reagent may be a protein and the labeled binding partner may be a labeled antibody. Alternatively, the immobilized reagent may be streptavidin and the labeled binding partner may be labeled biotin. The label on the binding partner used in the above embodiments may be any detectable label known in the art. In addition, other known binding partners may be used in accordance with the overall design described herein.

[0325] In certain example embodiments, the masking construct may comprise a ribozyme. Ribozymes are RNA molecules having catalytic properties. Ribozymes, both naturally and engineered, comprise or consist of RNA that may be targeted by the effector proteins disclosed herein. The ribozyme may be selected or engineered to catalyze a reaction that either generates a negative detectable signal or prevents generation of a positive control signal. Upon deactivation of the ribozyme by the activated effector protein the reaction generating a negative control signal, or preventing generation of a positive detectable signal, is removed thereby allowing a positive detectable signal to be generated. In one example embodiment, the ribozyme may catalyze a colorimetric reaction causing a solution to appear as a first color. When the ribozyme is deactivated the solution then turns to a second color, the second color being the detectable positive signal. An example of how ribozymes can be used to catalyze a colorimetric reaction are described in Zhao et al. “Signal amplification of glucosamine-6-phosphate based on ribozyme glmS,” Biosens Bioelectron. 2014; 16:337-42, and provide an example of how such a system could be modified to work in the context of the embodiments disclosed herein. Alternatively, ribozymes, when present can generate cleavage products of, for example, RNA transcripts. Thus, detection of a positive detectable signal may comprise detection of non-cleaved RNA transcripts that are only generated in the absence of the ribozyme.

[0326] In some embodiments, the masking construct may be a ribozyme that generates a negative detectable signal, and wherein a positive detectable signal is generated when the ribozyme is deactivated.

[0327] In certain example embodiments, the one or more reagents is a protein, such as an enzyme, capable of facilitating generation of a detectable signal, such as a colorimetric, chemiluminescent, or fluorescent signal, that is inhibited or sequestered such that the protein cannot generate the detectable signal by the binding of one or more DNA or RNA aptamers to the protein. Upon activation of the effector proteins disclosed herein, the DNA or RNA aptamers are cleaved or degraded to an extent that they no longer inhibit the protein's ability to generate the detectable signal. In certain example embodiments, the aptamer is a thrombin inhibitor aptamer. In certain example embodiments the thrombin inhibitor aptamer has a sequence of GGGAACAAAGCUGAAGUACUUACCC (SEQ ID NO:310). When this aptamer is cleaved, thrombin will become active and will cleave a peptide colorimetric or fluorescent substrate. In certain example embodiments, the colorimetric substrate is para-nitroanilide (pNA) covalently linked to the peptide substrate for thrombin. Upon cleavage by thrombin, pNA is released and becomes yellow in color and easily visible to the eye. In certain example embodiments, the fluorescent substrate is 7-amino-4-methylcoumarin a blue fluorophore that can be detected using a fluorescence detector. Inhibitory aptamers may also be used for horseradish peroxidase (HRP), beta-galactosidase, or calf alkaline phosphatase (CAP) and within the general principals laid out above.

[0328] In certain embodiments, RNAse or DNAse activity is detected colorimetrically via cleavage of enzyme-inhibiting aptamers. One potential mode of converting DNAse or RNAse activity into a colorimetric signal is to couple the cleavage of a DNA or RNA aptamer with the re-activation of an enzyme that is capable of producing a colorimetric output. In the absence of RNA or DNA cleavage, the intact aptamer will bind to the enzyme target and inhibit its activity. The advantage of this readout system is that the enzyme provides an additional amplification step: once liberated from an aptamer via collateral activity (e.g. Cpf1 collateral activity), the colorimetric enzyme will continue to produce colorimetric product, leading to a multiplication of signal.

[0329] In certain embodiments, an existing aptamer that inhibits an enzyme with a colorimetric readout is used. Several aptamer/enzyme pairs with colorimetric readouts exist, such as thrombin, protein C, neutrophil elastase, and subtilisin. These proteases have colorimetric substrates based upon pNA and are commercially available. In certain embodiments, a novel aptamer targeting a common colorimetric enzyme is used. Common and robust enzymes, such as beta-galactosidase, horseradish peroxidase, or calf intestinal alkaline phosphatase, could be targeted by engineered aptamers designed by selection strategies such as SELEX. Such strategies allow for quick selection of aptamers with nanomolar binding efficiencies and could be used for the development of additional enzyme/aptamer pairs for colorimetric readout.

[0330] In certain embodiments, the masking construct may be a DNA or RNA aptamer and/or may comprise a DNA or RNA-tethered inhibitor.

[0331] In certain embodiments, the masking construct may comprise a DNA or RNA oligonucleotide to which a detectable ligand and a masking component are attached.

[0332] In certain embodiments, RNAse or DNase activity is detected colorimetrically via cleavage of RNA-tethered inhibitors. Many common colorimetric enzymes have competitive, reversible inhibitors: for example, beta-galactosidase can be inhibited by galactose. Many of these inhibitors are weak, but their effect can be increased by increases in local concentration. By linking local concentration of inhibitors to DNase RNAse activity, colorimetric enzyme and inhibitor pairs can be engineered into DNase and RNAse sensors. The colorimetric DNase or RNAse sensor based upon small-molecule inhibitors involves three components: the colorimetric enzyme, the inhibitor, and a bridging RNA or DNA that is covalently linked to both the inhibitor and enzyme, tethering the inhibitor to the enzyme. In the uncleaved configuration, the enzyme is inhibited by the increased local concentration of the small molecule; when the DNA or RNA is cleaved (e.g. by Cas13 or Cas12 collateral cleavage), the inhibitor will be released and the colorimetric enzyme will be activated.

[0333] In certain embodiments, the aptamer or DNA- or RNA-tethered inhibitor may sequester an enzyme, wherein the enzyme generates a detectable signal upon release from the aptamer or DNA or RNA tethered inhibitor by acting upon a substrate. In some embodiments, the aptamer may be an inhibitor aptamer that inhibits an enzyme and prevents the enzyme from catalyzing generation of a detectable signal from a substance. In some embodiments, the DNA- or RNA-tethered inhibitor may inhibit an enzyme and may prevent the enzyme from catalyzing generation of a detectable signal from a substrate.

[0334] In certain embodiments, RNAse activity is detected colorimetrically via formation and/or activation of G-quadruplexes. G quadruplexes in DNA can complex with heme (iron (III)-protoporphyrin IX) to form a DNAzyme with peroxidase activity. When supplied with a peroxidase substrate (e.g. ABTS: (2,2′-Azinobis [3-ethylbenzothiazoline-6-sulfonic acid]-diammonium salt)), the G-quadruplex-heme complex in the presence of hydrogen peroxide causes oxidation of the substrate, which then forms a green color in solution. An example G-quadruplex forming DNA sequence is: GGGTAGGGCGGGTTGGGA (SEQ ID NO:311). By hybridizing an additional DNA or RNA sequence, referred to herein as a “staple,” to this DNA aptamer, formation of the G-quadraplex structure will be limited. Upon collateral activation, the staple will be cleaved allowing the G quadraplex to form and heme to bind. This strategy is particularly appealing because color formation is enzymatic, meaning there is additional amplification beyond collateral activation.

[0335] In certain embodiments, the masking construct may comprise an RNA oligonucleotide designed to bind a G-quadruplex forming sequence, wherein a G-quadruplex structure is formed by the G-quadruplex forming sequence upon cleavage of the masking construct, and wherein the G-quadruplex structure generates a detectable positive signal.

[0336] In certain example embodiments, the masking construct may be immobilized on a solid substrate in an individual discrete volume (defined further below) and sequesters a single reagent. For example, the reagent may be a bead comprising a dye. When sequestered by the immobilized reagent, the individual beads are too diffuse to generate a detectable signal, but upon release from the masking construct are able to generate a detectable signal, for example by aggregation or simple increase in solution concentration. In certain example embodiments, the immobilized masking agent is a DNA- or RNA-based aptamer that can be cleaved by the activated effector protein upon detection of a target molecule.

[0337] In one example embodiment, the masking construct comprises a detection agent that changes color depending on whether the detection agent is aggregated or dispersed in solution. For example, certain nanoparticles, such as colloidal gold, undergo a visible purple to red color shift as they move from aggregates to dispersed particles. Accordingly, in certain example embodiments, such detection agents may be held in aggregate by one or more bridge molecules. At least a portion of the bridge molecule comprises RNA or DNA. Upon activation of the effector proteins disclosed herein, the RNA or DNA portion of the bridge molecule is cleaved allowing the detection agent to disperse and resulting in the corresponding change in color. In certain example embodiments, the detection agent is a colloidal metal. The colloidal metal material may include water-insoluble metal particles or metallic compounds dispersed in a liquid, a hydrosol, or a metal sol. The colloidal metal may be selected from the metals in groups IA, IB, IIB and IIIB of the periodic table, as well as the transition metals, especially those of group VIII. Preferred metals include gold, silver, aluminum, ruthenium, zinc, iron, nickel and calcium. Other suitable metals also include the following in all of their various oxidation states: lithium, sodium, magnesium, potassium, scandium, titanium, vanadium, chromium, manganese, cobalt, copper, gallium, strontium, niobium, molybdenum, palladium, indium, tin, tungsten, rhenium, platinum, and gadolinium. The metals are preferably provided in ionic form, derived from an appropriate metal compound, for example the A13+, Ru3+, Zn2+, Fe3+, Ni2+ and Ca2+ ions.

[0338] When the RNA or DNA bridge is cut by the activated CRISPR effector, the aforementioned color shift is observed. In certain example embodiments the particles are colloidal metals. In certain other example embodiments, the colloidal metal is a colloidal gold. In certain example embodiments, the colloidal nanoparticles are 15 nm gold nanoparticles (AuNPs). Due to the unique surface properties of colloidal gold nanoparticles, maximal absorbance is observed at 520 nm when fully dispersed in solution and appear red in color to the naked eye. Upon aggregation of AuNPs, they exhibit a red-shift in maximal absorbance and appear darker in color, eventually precipitating from solution as a dark purple aggregate. In certain example embodiments the nanoparticles are modified to include DNA linkers extending from the surface of the nanoparticle. Individual particles are linked together by single-stranded RNA (ssRNA) or single-stranded DNA bridges that hybridize on each end to at least a portion of the DNA linkers. Thus, the nanoparticles will form a web of linked particles and aggregate, appearing as a dark precipitate. Upon activation of the CRISPR effectors disclosed herein, the ssRNA or ssDNA bridge will be cleaved, releasing the AU NPS from the linked mesh and producing a visible red color. Example DNA linkers and bridge sequences are listed below. Thiol linkers on the end of the DNA linkers may be used for surface conjugation to the AuNPS. Other forms of conjugation may be used. In certain example embodiments, two populations of AuNPs may be generated, one for each DNA linker. This will help facilitate proper binding of the ssRNA bridge with proper orientation. In certain example embodiments, a first DNA linker is conjugated by the 3′ end while a second DNA linker is conjugated by the 5′ end.

TABLE 9

| | |
|---|---|
| C2c2 colorimetric | TTATAACTATTCCTAAAAAAAAAAA/ |
| DNA1 (SEQ ID | 3ThioMC3-D/ |
| NO: 312) | |
| C2c2 colorimetric | /5ThioMC6- |
| DNA2 (SEQ ID | D/AAAAAAAAAACTCCCCTAATAACAAT |
| NO: 313) | |
| C2c2 colorimetric | GGGUAGGAAUAGUUAUAAUUUCCCUUUCCCA |
| bridge (SEQ ID | UUGUUAUUAGGGAG |
| NO: 314) | |

[0339] In certain other example embodiments, the masking construct may comprise an RNA or DNA oligonucleotide to which are attached a detectable label and a masking agent of that detectable label. An example of such a detectable label/masking agent pair is a fluorophore and a quencher of the fluorophore. Quenching of the fluorophore can occur as a result of the formation of a non-fluorescent complex between the fluorophore and another fluorophore or non-fluorescent molecule. This mechanism is known as ground-state complex formation, static quenching, or contact quenching. Accordingly, the RNA or DNA oligonucleotide may be designed so that the fluorophore and quencher are in sufficient proximity for contact quenching to occur. Fluorophores and their cognate quenchers are known in the art and can be selected for this purpose by one having ordinary skill in the art. The particular fluorophore/quencher pair is not critical in the context of this invention, only that selection of the fluorophore/quencher pairs ensures masking of the fluorophore. Upon activation of the effector proteins disclosed herein, the RNA or DNA oligonucleotide is cleaved thereby severing the proximity between the fluorophore and quencher needed to maintain the contact quenching effect. Accordingly, detection of the fluorophore may be used to determine the presence of a target molecule in a sample.

[0340] In certain other example embodiments, the masking construct may comprise one or more RNA oligonucleotides to which are attached one or more metal nanoparticles, such as gold nanoparticles. In some embodiments, the masking construct comprises a plurality of metal nanoparticles crosslinked by a plurality of RNA or DNA oligonucleotides forming a closed loop. In one embodiment, the masking construct comprises three gold nanoparticles crosslinked by three RNA or DNA oligonucleotides forming a closed loop. In some embodiments, the cleavage of the RNA or DNA oligonucleotides by the CRISPR effector protein leads to a detectable signal produced by the metal nanoparticles.

[0341] In certain other example embodiments, the masking construct may comprise one or more RNA or DNA oligonucleotides to which are attached one or more quantum dots. In some embodiments, the cleavage of the RNA or DNA oligonucleotides by the CRISPR effector protein leads to a detectable signal produced by the quantum dots.

[0342] In one example embodiment, the masking construct may comprise a quantum dot. The quantum dot may have multiple linker molecules attached to the surface. At least a portion of the linker molecule comprises RNA or DNA. The linker molecule is attached to the quantum dot at one end and to one or more quenchers along the length or at terminal ends of the linker such that the quenchers are maintained in sufficient proximity for quenching of the quantum dot to occur. The linker may be branched. As above, the quantum dot/quencher pair is not critical, only that selection of the quantum dot/quencher pair ensures masking of the fluorophore. Quantum dots and their cognate quenchers are known in the art and can be selected for this purpose by one having ordinary skill in the art. Upon activation of the effector proteins disclosed herein, the RNA or DNA portion of the linker molecule is cleaved thereby eliminating the proximity between the quantum dot and one or more quenchers needed to maintain the quenching effect. In certain example embodiments the quantum dot is streptavidin conjugated. RNA or DNA are attached via biotin linkers and recruit quenching molecules with the sequences/5Biosg/UCUCGUACGUUC/3IAbRQSp/ (SEQ ID NO:315) or /5Biosg/UCUCGUACGUUCUCUCGUACGUUC/3IAbRQSp/ (SEQ ID NO:316) where /5Biosg/ is a biotin tag and /31AbRQSp/ is an Iowa black quencher. Upon cleavage, by the activated effectors disclosed herein the quantum dot will fluoresce visibly.

[0343] In specific embodiments, the detectable ligand may be a fluorophore and the masking component may be a quencher molecule.

[0344] In a similar fashion, fluorescence energy transfer (FRET) may be used to generate a detectable positive signal. FRET is a non-radiative process by which a photon from an energetically excited fluorophore (i.e. “donor fluorophore”) raises the energy state of an electron in another molecule (i.e. “the acceptor”) to higher vibrational levels of the excited singlet state. The donor fluorophore returns to the ground state without emitting a fluoresce characteristic of that fluorophore. The acceptor can be another fluorophore or non-fluorescent molecule. If the acceptor is a fluorophore, the transferred energy is emitted as fluorescence characteristic of that fluorophore. If the acceptor is a non-fluorescent molecule the absorbed energy is loss as heat. Thus, in the context of the embodiments disclosed herein, the fluorophore/quencher pair is replaced with a donor fluorophore/acceptor pair attached to the oligonucleotide molecule. When intact, the masking construct generates a first signal (negative detectable signal) as detected by the fluorescence or heat emitted from the acceptor. Upon activation of the effector proteins disclosed herein the RNA oligonucleotide is cleaved and FRET is disrupted such that fluorescence of the donor fluorophore is now detected (positive detectable signal).

[0345] In certain example embodiments, the masking construct comprises the use of intercalating dyes which change their absorbance in response to cleavage of long RNAs or DNAs to short nucleotides. Several such dyes exist. For example, pyronine-Y will complex with RNA and form a complex that has an absorbance at 572 nm. Cleavage of the RNA results in loss of absorbance and a color change. Methylene blue may be used in a similar fashion, with changes in absorbance at 688 nm upon RNA cleavage. Accordingly, in certain example embodiments the masking construct comprises a RNA and intercalating dye complex that changes absorbance upon the cleavage of RNA by the effector proteins disclosed herein.

[0346] In certain example embodiments, the masking construct may comprise an initiator for an HCR reaction. See e.g. Dirks and Pierce. PNAS 101, 15275-15728 (2004). HCR reactions utilize the potential energy in two hairpin species. When a single-stranded initiator having a portion of complementary to a corresponding region on one of the hairpins is released into the previously stable mixture, it opens a hairpin of one species. This process, in turn, exposes a single-stranded region that opens a hairpin of the other species. This process, in turn, exposes a single stranded region identical to the original initiator. The resulting chain reaction may lead to the formation of a nicked double helix that grows until the hairpin supply is exhausted. Detection of the resulting products may be done on a gel or colorimetrically. Example colorimetric detection methods include, for example, those disclosed in Lu et al. “Ultra-sensitive colorimetric assay system based on the hybridization chain reaction-triggered enzyme cascade amplification ACS Appl Mater Interfaces, 2017, 9(1):167-175, Wang et al. “An enzyme-free colorimetric assay using hybridization chain reaction amplification and split aptamers” Analyst 2015, 150, 7657-7662, and Song et al. “Non covalent fluorescent labeling of hairpin DNA probe coupled with hybridization chain reaction for sensitive DNA detection.” Applied Spectroscopy, 70(4): 686-694 (2016).

[0347] In certain example embodiments, the masking construct suppresses generation of a detectable positive signal until cleaved by an activated CRISPR effector protein. In some embodiments, the masking construct may suppress generation of a detectable positive signal by masking the detectable positive signal, or generating a detectable negative signal instead.

### Amplification of Target

[0348] In certain example embodiments, target RNAs and/or DNAs may be amplified prior to activating the CRISPR effector protein. Any suitable RNA or DNA amplification technique may be used. In certain example embodiments, the RNA or DNA amplification is an isothermal amplification. In certain example embodiments, the isothermal amplification may be nucleic-acid sequenced-based amplification (NASBA), recombinase polymerase amplification (RPA), loop-mediated isothermal amplification (LAMP), strand displacement amplification (SDA), helicase-dependent amplification (HDA), or nicking enzyme amplification reaction (NEAR). In certain example embodiments, non-isothermal amplification methods may be used which include, but are not limited to, PCR, multiple displacement amplification (MDA), rolling circle amplification (RCA), ligase chain reaction (LCR), or ramification amplification method (RAM).

[0349] In certain example embodiments, the RNA or DNA amplification is NASBA, which is initiated with reverse transcription of target RNA by a sequence-specific reverse primer to create a RNA/DNA duplex. RNase H is then used to degrade the RNA template, allowing a forward primer containing a promoter, such as the T7 promoter, to bind and initiate elongation of the complementary strand, generating a double-stranded DNA product. The RNA polymerase promoter-mediated transcription of the DNA template then creates copies of the target RNA sequence. Importantly, each of the new target RNAs can be detected by the guide RNAs thus further enhancing the sensitivity of the assay. Binding of the target RNAs by the guide RNAs then leads to activation of the CRISPR effector protein and the methods proceed as outlined above. The NASBA reaction has the additional advantage of being able to proceed under moderate isothermal conditions, for example at approximately 41° C., making it suitable for systems and devices deployed for early and direct detection in the field and far from clinical laboratories.

[0350] In certain other example embodiments, a recombinase polymerase amplification (RPA) reaction may be used to amplify the target nucleic acids. RPA reactions employ recombinases which are capable of pairing sequence-specific primers with homologous sequence in duplex DNA. If target DNA is present, DNA amplification is initiated and no other sample manipulation such as thermal cycling or chemical melting is required. The entire RPA amplification system is stable as a dried formulation and can be transported safely without refrigeration. RPA reactions may also be carried out at isothermal temperatures with an optimum reaction temperature of 37-42o C. The sequence specific primers are designed to amplify a sequence comprising the target nucleic acid sequence to be detected. In certain example embodiments, a RNA polymerase promoter, such as a T7 promoter, is added to one of the primers. This results in an amplified double-stranded DNA product comprising the target sequence and a RNA polymerase promoter. After, or during, the RPA reaction, a RNA polymerase is added that will produce RNA from the double-stranded DNA templates. The amplified target RNA can then in turn be detected by the CRISPR effector system. In this way target DNA can be detected using the embodiments disclosed herein. RPA reactions can also be used to amplify target RNA. The target RNA is first converted to cDNA using a reverse transcriptase, followed by second strand DNA synthesis, at which point the RPA reaction proceeds as outlined above.

[0351] In an embodiment of the invention may comprise nickase-based amplification. The nicking enzyme may be a CRISPR protein. Accordingly, the introduction of nicks into dsDNA can be programmable and sequence-specific. FIG. 115 depicts an embodiment of the invention, which starts with two guides designed to target opposite strands of a dsDNA target. According to the invention, the nickase can be Cpf1, C2c1, Cas9 or any ortholog or CRISPR protein that cleaves or is engineered to cleave a single strand of a DNA duplex. The nicked strands may then be extended by a polymerase. In an embodiment, the locations of the nicks are selected such that extension of the strands by a polymerase is towards the central portion of the target duplex DNA between the nick sites. In certain embodiments, primers are included in the reaction capable of hybridizing to the extended strands followed by further polymerase extension of the primers to regenerate two dsDNA pieces: a first dsDNA that includes the first strand Cpf1 guide site or both the first and second strand Cpf1 guide sites, and a second dsDNA that includes the second strand Cpf1 guide site or both the first and second strand Cprf guide sites. These pieces continue to be nicked and extended in a cyclic reaction that exponentially amplifies the region of the target between nicking sites.

[0352] The amplification can be isothermal and selected for temperature. In one embodiment, the amplification proceeds rapidly at 37 degrees. In other embodiments, the temperature of the isothermal amplification may be chosen by selecting a polymerase (e.g. Bsu, Bst, Phi29, klenow fragment etc.).operable at a different temperature.

[0353] Thus, whereas nicking isothermal amplification techniques use nicking enzymes with fixed sequence preference (e.g. in nicking enzyme amplification reaction or NEAR), which requires denaturing of the original dsDNA target to allow annealing and extension of primers that add the nicking substrate to the ends of the target, use of a CRISPR nickase wherein the nicking sites can be programed via guide RNAs means that no denaturing step is necessary, enabling the entire reaction to be truly isothermal. This also simplifies the reaction because these primers that add the nicking substrate are different than the primers that are used later in the reaction, meaning that NEAR requires two primer sets (i.e. 4 primers) while Cpf1 nicking amplification only requires one primer set (i.e. two primers). This makes nicking Cpf1 amplification much simpler and easier to operate without complicated instrumentation to perform the denaturation and then cooling to the isothermal temperature.

[0354] Accordingly, in certain example embodiments the systems disclosed herein may include amplification reagents. Different components or reagents useful for amplification of nucleic acids are described herein. For example, an amplification reagent as described herein may include a buffer, such as a Tris buffer. A Tris buffer may be used at any concentration appropriate for the desired application or use, for example including, but not limited to, a concentration of 1 mM, 2 mM, 3 mM, 4 mM, 5 mM, 6 mM, 7 mM, 8 mM, 9 mM, 10 mM, 11 mM, 12 mM, 13 mM, 14 mM, 15 mM, 25 mM, 50 mM, 75 mM, 1 M, or the like. One of skill in the art will be able to determine an appropriate concentration of a buffer such as Tris for use with the present invention.

[0355] A salt, such as magnesium chloride (MgCl2), potassium chloride (KCl), or sodium chloride (NaCl), may be included in an amplification reaction, such as PCR, in order to improve the amplification of nucleic acid fragments. Although the salt concentration will depend on the particular reaction and application, in some embodiments, nucleic acid fragments of a particular size may produce optimum results at particular salt concentrations. Larger products may require altered salt concentrations, typically lower salt, in order to produce desired results, while amplification of smaller products may produce better results at higher salt concentrations. One of skill in the art will understand that the presence and/or concentration of a salt, along with alteration of salt concentrations, may alter the stringency of a biological or chemical reaction, and therefore any salt may be used that provides the appropriate conditions for a reaction of the present invention and as described herein.

[0356] Other components of a biological or chemical reaction may include a cell lysis component in order to break open or lyse a cell for analysis of the materials therein. A cell lysis component may include, but is not limited to, a detergent, a salt as described above, such as NaCl, KCl, ammonium sulfate [(NH4)2SO4], or others. Detergents that may be appropriate for the invention may include Triton X-100, sodium dodecyl sulfate (SDS), CHAPS (3-[(3-cholamidopropyl)dimethylammonio]-1-propanesulfonate), ethyl trimethyl ammonium bromide, nonyl phenoxypolyethoxylethanol (NP-40). Concentrations of detergents may depend on the particular application, and may be specific to the reaction in some cases. Amplification reactions may include dNTPs and nucleic acid primers used at any concentration appropriate for the invention, such as including, but not limited to, a concentration of 100 nM, 150 nM, 200 nM, 250 nM, 300 nM, 350 nM, 400 nM, 450 nM, 500 nM, 550 nM, 600 nM, 650 nM, 700 nM, 750 nM, 800 nM, 850 nM, 900 nM, 950 nM, 1 mM, 2 mM, 3 mM, 4 mM, 5 mM, 6 mM, 7 mM, 8 mM, 9 mM, 10 mM, 20 mM, 30 mM, 40 mM, 50 mM, 60 mM, 70 mM, 80 mM, 90 mM, 100 mM, 150 mM, 200 mM, 250 mM, 300 mM, 350 mM, 400 mM, 450 mM, 500 mM, or the like. Likewise, a polymerase useful in accordance with the invention may be any specific or general polymerase known in the art and useful or the invention, including Taq polymerase, Q5 polymerase, or the like.

[0357] In some embodiments, amplification reagents as described herein may be appropriate for use in hot-start amplification. Hot start amplification may be beneficial in some embodiments to reduce or eliminate dimerization of adaptor molecules or oligos, or to otherwise prevent unwanted amplification products or artifacts and obtain optimum amplification of the desired product. Many components described herein for use in amplification may also be used in hot-start amplification. In some embodiments, reagents or components appropriate for use with hot-start amplification may be used in place of one or more of the composition components as appropriate. For example, a polymerase or other reagent may be used that exhibits a desired activity at a particular temperature or other reaction condition. In some embodiments, reagents may be used that are designed or optimized for use in hot-start amplification, for example, a polymerase may be activated after transposition or after reaching a particular temperature. Such polymerases may be antibody-based or aptamer-based. Polymerases as described herein are known in the art. Examples of such reagents may include, but are not limited to, hot-start polymerases, hot-start dNTPs, and photo-caged dNTPs. Such reagents are known and available in the art. One of skill in the art will be able to determine the optimum temperatures as appropriate for individual reagents.

[0358] Amplification of nucleic acids may be performed using specific thermal cycle machinery or equipment, and may be performed in single reactions or in bulk, such that any desired number of reactions may be performed simultaneously. In some embodiments, amplification may be performed using microfluidic or robotic devices, or may be performed using manual alteration in temperatures to achieve the desired amplification. In some embodiments, optimization may be performed to obtain the optimum reactions conditions for the particular application or materials. One of skill in the art will understand and be able to optimize reaction conditions to obtain sufficient amplification.

[0359] In certain embodiments, detection of DNA with the methods or systems of the invention requires transcription of the (amplified) DNA into RNA prior to detection.

[0360] It will be evident that detection methods of the invention can involve nucleic acid amplification and detection procedures in various combinations. The nucleic acid to be detected can be any naturally occurring or synthetic nucleic acid, including but not limited to DNA and RNA, which may be amplified by any suitable method to provide an intermediate product that can be detected. Detection of the intermediate product can be by any suitable method including but not limited to binding and activation of a CRISPR protein which produces a detectable signal moiety by direct or collateral activity.

### Enrichment CRISPR Systems

[0361] In certain example embodiments, target RNA or DNA may first be enriched prior to detection or amplification of the target RNA or DNA. In certain example embodiments, this enrichment may be achieved by binding of the target nucleic acids by a CRISPR effector system.

[0362] Current target-specific enrichment protocols require single-stranded nucleic acid prior to hybridization with probes. Among various advantages, the present embodiments can skip this step and enable direct targeting to double-stranded DNA (either partly or completely double-stranded). In addition, the embodiments disclosed herein are enzyme-driven targeting methods that offer faster kinetics and easier workflow allowing for isothermal enrichment. In certain example embodiments enrichment may take place at temperatures as low as 20-37o C. In certain example embodiments, a set of guide RNAs to different target nucleic acids are used in a single assay, allowing for detection of multiple targets and/or multiple variants of a single target.

[0363] In certain example embodiments, a dead CRISPR effector protein may bind the target nucleic acid in solution and then subsequently be isolated from said solution. For example, the dead CRISPR effector protein bound to the target nucleic acid, may be isolated from the solution using an antibody or other molecule, such as an aptamer, that specifically binds the dead CRISPR effector protein.

[0364] In other example embodiments, the dead CRISPR effector protein may bound to a solid substrate. A fixed substrate may refer to any material that is appropriate for or can be modified to be appropriate for the attachment of a polypeptide or a polynucleotide. Possible substrates include, but are not limited to, glass and modified functionalized glass, plastics (including acrylics, polystyrene and copolymers of styrene and other materials, polypropylene, polyethylene, polybutylene, polyurethanes, Teflon™, etc.), polysaccharides, nylon or nitrocellulose, ceramics, resins, silica or silica-based materials including silicon and modified silicon, carbon, metals, inorganic glasses, plastics, optical fiber bundles, and a variety of other polymers. In some embodiments, the solid support comprises a patterned surface suitable for immobilization of molecules in an ordered pattern. In certain embodiments a patterned surface refers to an arrangement of different regions in or on an exposed layer of a solid support. In some embodiments, the solid support comprises an array of wells or depressions in a surface. The composition and geometry of the solid support can vary with its use. In some embodiments, the solids support is a planar structure such as a slide, chip, microchip and/or array. As such, the surface of the substrate can be in the form of a planar layer. In some embodiments, the solid support comprises one or more surfaces of a flowcell. The term “flowcell” as used herein refers to a chamber comprising a solid surface across which one or more fluid reagents can be flowed. Example flowcells and related fluidic systems and detection platforms that can be readily used in the methods of the present disclosure are described, for example, in Bentley et al. Nature 456:53-59 (2008), WO 04/0918497, U.S. Pat. No. 7,057,026; WO 91/06678; WO 07/123744; U.S. Pat. Nos. 7,329,492; 7,211,414; 7,315,019; 7,405,281, and US 2008/0108082. In some embodiments, the solid support or its surface is non-planar, such as the inner or outer surface of a tube or vessel. In some embodiments, the solid support comprise microspheres or beads. “Microspheres,” “bead,” “particles,” are intended to mean within the context of a solid substrate to mean small discrete particles made of various material including, but not limited to, plastics, ceramics, glass, and plystyrene. In certain embodiments, the microspheres are magnetic microspheres or beads. Alternatively or additionally, the beads may be porous. The bead sizes range from nanometers, e.g. 100 nm, to millimeters, e.g. 1 mm.

[0365] A sample containing, or suspected of containing, the target nucleic acids may then be exposed to the substrate to allow binding of the target nucleic acids to the bound dead CRISPR effector protein. Non-target molecules may then be washed away. In certain example embodiments, the target nucleic acids may then be released from the CRISPR effector protein/guide RNA complex for further detection using the methods disclosed herein. In certain example embodiments, the target nucleic acids may first be amplified as described herein.

[0366] In certain example embodiments, the CRISPR effector may be labeled with a binding tag. In certain example embodiments the CRISPR effector may be chemically tagged. For example, the CRISPR effector may be chemically biotinylated. In another example embodiment, a fusion may be created by adding additional sequence encoding a fusion to the CRISPR effector. One example of such a fusion is an AviTag™, which employs a highly targeted enzymatic conjugation of a single biotin on a unique 15 amino acid peptide tag. In certain embodiments, the CRISPR effector may be labeled with a capture tag such as, but not limited to, GST, Myc, hemagglutinin (HA), green fluorescent protein (GFP), flag, His tag, TAP tag, and Fc tag. The binding tag, whether a fusion, chemical tag, or capture tag, may be used to either pull down the CRISPR effector system once it has bound a target nucleic acid or to fix the CRISPR effector system on the solid substrate.

[0367] In certain example embodiments, the guide RNA may be labeled with a binding tag. In certain example embodiments, the entire guide RNA may be labeled using in vitro transcription (IVT) incorporating one or more biotinylated nucleotides, such as, biotinylated uracil. In some embodiments, biotin can be chemically or enzymatically added to the guide RNA, such as, the addition of one or more biotin groups to the 3′ end of the guide RNA. The binding tag may be used to pull down the guide RNA/target nucleic acid complex after binding has occurred, for example, by exposing the guide RNA/target nucleic acid to a streptavidin coated solid substrate.

[0368] In specific embodiments, the solid substrated may be a flow cell. In certain embodiments, a flow cell may be a device for detecting the presence or amount of an analyte in a test sample. The flow cell device may have immobilized reagent means which produce an electrically or optically detectable response to an analyte which may be contained in a test sample.

[0369] Accordingly, in certain example embodiments, an engineered or non-naturally-occurring CRISPR effector may be used for enrichment purposes. In an embodiment, the modification may comprise mutation of one or more amino acid residues of the effector protein. The one or more mutations may be in one or more catalytically active domains of the effector protein. The effector protein may have reduced or abolished nuclease activity compared with an effector protein lacking said one or more mutations. The effector protein may not direct cleavage of the RNA strand at the target locus of interest. In a preferred embodiment, the one or more mutations may comprise two mutations. In a preferred embodiment the one or more amino acid residues are modified in a C2c2 effector protein, e.g., an engineered or non-naturally-occurring effector protein or C2c2. In particular embodiments, the one or more modified of mutated amino acid residues are one or more of those in C2c2 corresponding to R597, H602, R1278 and H1283 (referenced to Lsh C2c2 amino acids), such as mutations R597A, H602A, R1278A and H1283A, or the corresponding amino acid residues in Lsh C2c2 orthologues.

[0370] As such, the enrichment CRISPR system may comprise a catalytically inactive CRISPR effector protein. In specific embodiments, the catalytically inactive CRISPR effector protein is a catalyically inactive C2c2.

[0371] In particular embodiments, the one or more modified of mutated amino acid residues are one or more of those in C2c2 corresponding to K2, K39, V40, E479, L514, V518, N524, G534, K535, E580, L597, V602, D630, F676, L709, 1713, R717 (HEPN), N718, H722 (HEPN), E773, P823, V828, 1879, Y880, F884, Y997, L1001, F1009, L1013, Y1093, L1099, L1111, Y1114, L1203, D1222, Y1244, L1250, L1253, K1261, 11334, L1355, L1359, R1362, Y1366, E1371, R1372, D1373, R1509 (HEPN), H1514 (HEPN), Y1543, D1544, K1546, K1548, V1551, 11558, according to C2c2 consensus numbering. In certain embodiments, the one or more modified of mutated amino acid residues are one or more of those in C2c2 corresponding to R717 and R1509. In certain embodiments, the one or more modified of mutated amino acid residues are one or more of those in C2c2 corresponding to K2, K39, K535, K1261, R1362, R1372, K1546 and K1548. In certain embodiments, said mutations result in a protein having an altered or modified activity. In certain embodiments, said mutations result in a protein having a reduced activity, such as reduced specificity. In certain embodiments, said mutations result in a protein having no catalytic activity (i.e. “dead” C2c2). In an embodiment, said amino acid residues correspond to Lsh C2c2 amino acid residues, or the corresponding amino acid residues of a C2c2 protein from a different species. Devices that can facilitate these steps. In some embodiments, to reduce the size of a fusion protein of the Cas13b effector and the one or more functional domains, the C-terminus of the Cas13b effector can be truncated while still maintaining its RNA binding function. For example, at least 20 amino acids, at least 50 amino acids, at least 80 amino acids, or at least 100 amino acids, or at least 150 amino acids, or at least 200 amino acids, or at least 250 amino acids, or at least 300 amino acids, or at least 350 amino acids, or up to 120 amino acids, or up to 140 amino acids, or up to 160 amino acids, or up to 180 amino acids, or up to 200 amino acids, or up to 250 amino acids, or up to 300 amino acids, or up to 350 amino acids, or up to 400 amino acids, may be truncated at the C-terminus of the Cas13b effector. Specific examples of Cas13b truncations include C-terminal 4984-1090, C-terminal 41026-1090, and C-terminal 41053-1090, C-terminal 4934-1090, C-terminal 4884-1090, C-terminal 4834-1090, C-terminal 4784-1090, and C-terminal 4734-1090, wherein amino acid positions correspond to amino acid positions of Prevotella sp. P5-125 Cas13b protein.

[0372] The above enrichment systems may also be used to deplete a sample of certain nucleic acids. For example, guide RNAs may be designed to bind non-target RNAs to remove the non-target RNAs from the sample. In one example embodiment, the guide RNAs may be designed to bind nucleic acids that do carry a particular nucleic acid variation. For example, in a given sample a higher copy number of non-variant nucleic acids may be expected. Accordingly, the embodiments disclosed herein may be used to remove the non-variant nucleic acids from a sample, to increase the efficiency with which the detection CRISPR effector system can detect the target variant sequences in a given sample.

Amplification and/or Enhancement of Detectable Positive Signal

[0373] In certain example embodiments, further modification may be introduced that further amplify the detectable positive signal. For example, activated CRISPR effector protein collateral activation may be use to generate a secondary target or additional guide sequence, or both. In one example embodiment, the reaction solution would contain a secondary target that is spiked in at high concentration. The secondary target may be distinct from the primary target (i.e. the target for which the assay is designed to detect) and in certain instances may be common across all reaction volumes. A secondary guide sequence for the secondary target may be protected, e.g. by a secondary structural feature such as a hairpin with a RNA loop, and unable to bind the second target or the CRISPR effector protein. Cleavage of the protecting group by an activated CRISPR effector protein (i.e. after activation by formation of complex with the primary target(s) in solution) and formation of a complex with free CRISPR effector protein in solution and activation from the spiked in secondary target. In certain other example embodiments, a similar concept is used with a second guide sequence to a secondary target sequence. The secondary target sequence may be protected a structural feature or protecting group on the secondary target. Cleavage of a protecting group off the secondary target then allows additional CRISPR effector protein/second guide sequence/secondary target complex to form. In yet another example embodiment, activation of CRISPR effector protein by the primary target(s) may be used to cleave a protected or circularized primer, which is then released to perform an isothermal amplification reaction, such as those disclosed herein, on a template that encodes a secondary guide sequence, secondary target sequence, or both. Subsequent transcription of this amplified template would produce more secondary guide sequence and/or secondary target sequence, followed by additional CRISPR effector protein collateral activation.

### Detection of Proteins

[0374] The systems, devices, and methods disclosed herein may also be adapted for detection of polypeptides (or other molecules) in addition to detection of nucleic acids, via incorporation of a specifically configured polypeptide detection aptamer. The polypeptide detection aptamers are distinct from the masking construct aptamers discussed above. First, the aptamers are designed to specifically bind to one or more target molecules. In one example embodiment, the target molecule is a target polypeptide. In another example embodiment, the target molecule is a target chemical compound, such as a target therapeutic molecule. Methods for designing and selecting aptamers with specificity for a given target, such as SELEX, are known in the art. In addition to specificity to a given target the aptamers are further designed to incorporate a RNA polymerase promoter binding site. In certain example embodiments, the RNA polymerase promoter is a T7 promoter. Prior to binding the apatamer binding to a target, the RNA polymerase site is not accessible or otherwise recognizable to a RNA polymerase. However, the aptamer is configured so that upon binding of a target the structure of the aptamer undergoes a conformational change such that the RNA polymerase promoter is then exposed. An aptamer sequence downstream of the RNA polymerase promoter acts as a template for generation of a trigger RNA oligonucleotide by a RNA polymerase. Thus, the template portion of the aptamer may further incorporate a barcode or other identifying sequence that identifies a given aptamer and its target. Guide RNAs as described above may then be designed to recognize these specific trigger oligonucleotide sequences. Binding of the guide RNAs to the trigger oligonucleotides activates the CRISPR effector proteins which proceeds to deactivate the masking constructs and generate a positive detectable signal as described previously.

[0375] Accordingly, in certain example embodiments, the methods disclosed herein comprise the additional step of distributing a sample or set of sample into a set of individual discrete volumes, each individual discrete volume comprising peptide detection aptamers, a CRISPR effector protein, one or more guide RNAs, a masking construct, and incubating the sample or set of samples under conditions sufficient to allow binding of the detection aptamers to the one or more target molecules, wherein binding of the aptamer to a corresponding target results in exposure of the RNA polymerase promoter binding site such that synthesis of a trigger RNA is initiated by the binding of a RNA polymerase to the RNA polymerase promoter binding site.

[0376] In another example embodiment, binding of the aptamer may expose a primer binding site upon binding of the aptamer to a target polypeptide. For example, the aptamer may expose a RPA primer binding site. Thus, the addition or inclusion of the primer will then feed into an amplification reaction, such as the RPA reaction outlined above.

[0377] In certain example embodiments, the aptamer may be a conformation-switching aptamer, which upon binding to the target of interest may change secondary structure and expose new regions of single-stranded DNA. In certain example embodiments, these new-regions of single-stranded DNA may be used as substrates for ligation, extending the aptamers and creating longer ssDNA molecules which can be specifically detected using the embodiments disclosed herein. The aptamer design could be further combined with ternary complexes for detection of low-epitope targets, such as glucose (Yang et al. 2015: http://pubs.acs.org/doi/abs/10.1021/acs.analchem.5b01634). Example conformation shifting aptamers and corresponding guide RNAs (crRNAs) are shown in Table 10 below.

TABLE 10

| | |
|---|---|
| Thrombin aptamer | (SEQ ID NO: 317) |
| Thrombin ligation probe | (SEQ ID NO: 318) |
| Thrombin RPA forward 1 primer | ((SEQ ID NO: 319) |
| Thrombin RPA forward 2 primer | (SEQ ID NO: 320) |
| Thrombin RPA reverse 1 primer | (SEQ ID NO: 321) |
| Thrombin crRNA 1 | (SEQ ID NO: 322) |
| Thrombin crRNA 2 | (SEQ ID NO: 323) |
| Thrombin crRNA 3 | (SEQ ID NO: 324) |
| PTK7 full length amplicon control | (SEQ ID NO: 325) |
| PTK7 aptamer | (SEQ ID NO: 326) |
| PTK7 ligation probe | (SEQ ID NO: 327) |
| PTK7 RPA forward 1 primer | (SEQ ID NO: 328) |
| PTK7 RPA reverse 1 primer | (SEQ ID NO: 329) |
| PTK7 crRNA 1 | (SEQ ID NO: 330) |
| PTK7 crRNA 2 | (SEQ ID NO: 331) |
| PTK7 crRNA 3 | (SEQ ID NO: 332) |

### Diagnostic Devices

[0378] The systems described herein can be embodied on diagnostic devices. A number of substrates and configurations may be used. The devices may be capable of defining multiple individual discrete volumes within the device. As used herein an “individual discrete volume” refers to a discrete space, such as a container, receptacle, or other defined volume or space that can be defined by properties that prevent and/or inhibit migration of target molecules, for example a volume or space defined by physical properties such as walls, for example the walls of a well, tube, or a surface of a droplet, which may be impermeable or semipermeable, or as defined by other means such as chemical, diffusion rate limited, electro-magnetic, or light illumination, or any combination thereof that can contain a sample within a defined space. Individual discrete volumes may be identified by molecular tags, such as nucleic acid barcodes. By “diffusion rate limited” (for example diffusion defined volumes) is meant spaces that are only accessible to certain molecules or reactions because diffusion constraints effectively defining a space or volume as would be the case for two parallel laminar streams where diffusion will limit the migration of a target molecule from one stream to the other. By “chemical” defined volume or space is meant spaces where only certain target molecules can exist because of their chemical or molecular properties, such as size, where for example gel beads may exclude certain species from entering the beads but not others, such as by surface charge, matrix size or other physical property of the bead that can allow selection of species that may enter the interior of the bead. By “electro-magnetically” defined volume or space is meant spaces where the electro-magnetic properties of the target molecules or their supports such as charge or magnetic properties can be used to define certain regions in a space such as capturing magnetic particles within a magnetic field or directly on magnets. By “optically” defined volume is meant any region of space that may be defined by illuminating it with visible, ultraviolet, infrared, or other wavelengths of light such that only target molecules within the defined space or volume may be labeled. One advantage to the use of non-walled, or semipermeable discrete volumes is that some reagents, such as buffers, chemical activators, or other agents may be passed through the discrete volume, while other materials, such as target molecules, may be maintained in the discrete volume or space. Typically, a discrete volume will include a fluid medium, (for example, an aqueous solution, an oil, a buffer, and/or a media capable of supporting cell growth) suitable for labeling of the target molecule with the indexable nucleic acid identifier under conditions that permit labeling. Exemplary discrete volumes or spaces useful in the disclosed methods include droplets (for example, microfluidic droplets and/or emulsion droplets), hydrogel beads or other polymer structures (for example poly-ethylene glycol di-acrylate beads or agarose beads), tissue slides (for example, fixed formalin paraffin embedded tissue slides with particular regions, volumes, or spaces defined by chemical, optical, or physical means), microscope slides with regions defined by depositing reagents in ordered arrays or random patterns, tubes (such as, centrifuge tubes, microcentrifuge tubes, test tubes, cuvettes, conical tubes, and the like), bottles (such as glass bottles, plastic bottles, ceramic bottles, Erlenmeyer flasks, scintillation vials and the like), wells (such as wells in a plate), plates, pipettes, or pipette tips among others. In certain embodiments, the compartment is an aqueous droplet in a water-in-oil emulsion. In specific embodiments, any of the applications, methods, or systems described herein requiring exact or uniform volumes may employ the use of an acoustic liquid dispenser.

[0379] In some embodiments, the individual discrete volumes may be droplets.

[0380] In certain example embodiments, the device comprises a flexible material substrate on which a number of spots may be defined. Flexible substrate materials suitable for use in diagnostics and biosensing are known within the art. The flexible substrate materials may be made of plant derived fibers, such as cellulosic fibers, or may be made from flexible polymers such as flexible polyester films and other polymer types. Within each defined spot, reagents of the system described herein are applied to the individual spots. Each spot may contain the same reagents except for a different guide RNA or set of guide RNAs, or where applicable, a different detection aptamer to screen for multiple targets at once. Thus, the systems and devices herein may be able to screen samples from multiple sources (e.g. multiple clinical samples from different individuals) for the presence of the same target, or a limited number of targets, or aliquots of a single sample (or multiple samples from the same source) for the presence of multiple different targets in the sample. In certain example embodiments, the elements of the systems described herein are freeze dried onto the paper or cloth substrate. Example flexible material based substrates that may be used in certain example devices are disclosed in Pardee et al. Cell. 2016, 165(5):1255-66 and Pardee et al. Cell. 2014, 159(4):950-54. Suitable flexible material-based substrates for use with biological fluids, including blood are disclosed in International Patent Application Publication No. WO/2013/071301 entitled “Paper based diagnostic test” to Shevkoplyas et al. U.S. Patent Application Publication No. 2011/0111517 entitled “Paper-based microfluidic systems” to Siegel et al. and Shafiee et al. “Paper and Flexible Substrates as Materials for Biosensing Platforms to Detect Multiple Biotargets” Scientific Reports 5:8719 (2015). Further flexible based materials, including those suitable for use in wearable diagnostic devices are disclosed in Wang et al. “Flexible Substrate-Based Devices for Point-of-Care Diagnostics” Cell 34(11):909-21 (2016). Further flexible based materials may include nitrocellulose, polycarbonate, methylethyl cellulose, polyvinylidene fluoride (PVDF), polystyrene, or glass (see e.g., US20120238008). In certain embodiments, discrete volumes are separated by a hydrophobic surface, such as but not limited to wax, photoresist, or solid ink.

[0381] In some embodiments, a dosimeter or badge may be provided that serves as a sensor or indicator such that the wearer is notified of exposure to certain microbes or other agents. For example, the systems described herein may be used to detect a particular pathogen. Likewise, aptamer based embodiments disclosed above may be used to detect both polypeptide as well as other agents, such as chemical agents, to which a specific aptamer may bind. Such a device may be useful for surveillance of soldiers or other military personnel, as well as clinicians, researchers, hospital staff, and the like, in order to provide information relating to exposure to potentially dangerous agents as quickly as possible, for example for biological or chemical warfare agent detection. In other embodiments, such a surveillance badge may be used for preventing exposure to dangerous microbes or pathogens in immunocompromised patients, burn patients, patients undergoing chemotherapy, children, or elderly individuals.

[0382] In specific embodiments, each individual discrete volume further comprises one or more detection aptamers comprising a masked RNA polymerase promoter binding site or a masked primer binding site. As such, each individual discrete volume may further comprise nucleic acid amplification reagents.

[0383] In specific embodiments, the target molecule may be a target DNA and the individual discrete volumes further comprise a primer that binds the target DNA and comprises an RNA polymerase promoter.

[0384] Samples sources that may be analyzed using the systems and devices described herein include biological samples of a subject or environmental samples. Environmental samples may include surfaces or fluids. The biological samples may include, but are not limited to, saliva, blood, plasma, sera, stool, urine, sputum, mucous, lymph, synovial fluid, spinal fluid, cerebrospinal fluid, a swab from skin or a mucosal membrane, or combination thereof. In an example embodiment, the environmental sample is taken from a solid surface, such as a surface used in the preparation of food or other sensitive compositions and materials.

[0385] In other example embodiments, the elements of the systems described herein may be place on a single use substrate, such as swab or cloth that is used to swab a surface or sample fluid. For example, the system could be used to test for the presence of a pathogen on a food by swabbing the surface of a food product, such as a fruit or vegetable. Similarly, the single use substrate may be used to swab other surfaces for detection of certain microbes or agents, such as for use in security screening. Single use substrates may also have applications in forensics, where the CRISPR systems are designed to detect, for example identifying DNA SNPs that may be used to identify a suspect, or certain tissue or cell markers to determine the type of biological matter present in a sample. Likewise, the single use substrate could be used to collect a sample from a patient—such as a saliva sample from the mouth—or a swab of the skin. In other embodiments, a sample or swab may be taken of a meat product on order to detect the presence of absence of contaminants on or within the meat product.

[0386] Near-real-time microbial diagnostics are needed for food, clinical, industrial, and other environmental settings (see e.g., Lu T K, Bowers J, and Koeris M S., Trends Biotechnol. 2013 June; 31(6):325-7). In certain embodiments, the present invention is used for rapid detection of foodborne pathogens using guide RNAs specific to a pathogen (e.g., Campylobacter jejuni, Clostridium perfringens, Salmonella spp., Escherichia coli, Bacillus cereus, Listeria monocytogenes, Shigella spp., Staphylococcus aureus, Staphylococcal enteritis, Streptococcus, Vibrio cholerae, Vibrio parahaemolyticus, Vibrio vulnificus, Yersinia enterocolitica and Yersinia pseudotuberculosis, Brucella spp., Corynebacterium ulcerans, Coxiella burnetii, or Plesiomonas shigelloides).

[0387] In certain embodiments, the device is or comprises a flow strip. For instance, a lateral flow strip allows for RNAse (e.g. C2c2) detection by color. The RNA reporter is modified to have a first molecule (such as for instance FITC) attached to the 5′ end and a second molecule (such as for instance biotin) attached to the 3′ end (or vice versa). The lateral flow strip is designed to have two capture lines with anti-first molecule (e.g. anti-FITC) antibodies hybridized at the first line and anti-second molecule (e.g. anti-biotin) antibodies at the second downstream line. As the reaction flows down the strip, uncleaved reporter will bind to anti-first molecule antibodies at the first capture line, while cleaved reporters will liberate the second molecule and allow second molecule binding at the second capture line. Second molecule sandwich antibodies, for instance conjugated to nanoparticles, such as gold nanoparticles, will bind any second molecule at the first or second line and result in a strong readout/signal (e.g. color). As more reporter is cleaved, more signal will accumulate at the second capture line and less signal will appear at the first line. In certain aspects, the invention relates to the use of a follow strip as described herein for detecting nucleic acids or polypeptides. In certain aspects, the invention relates to a method for detecting nucleic acids or polypeptides with a flow strip as defined herein, e.g. (lateral) flow tests or (lateral) flow immunochromatographic assays.

[0388] The embodiments disclosed herein are directed to lateral flow detection devices that comprise SHERLOCK systems. The device may comprise a lateral flow substrate for detecting a SHERLOCK reaction. Substrates suitable for use in lateral flow assays are known in the art. These may include, but are not necessarily limited to membranes or pads made of cellulose and/or glass fiber, polyesters, nitrocellulose, or absorbent pads (J Saudi Chem Soc 19(6):689-705; 2015). The SHERLOCK system, i.e. one or more CRISPR systems and corresponding reporter constructs are added to the lateral flow substrate at a defined reagent portion of the lateral flow substrate, typically on one end of the lateral flow substrate. Reporting constructs used within the context of the present invention comprise a first molecule and a second molecule linked by an RNA or DNA linker. The lateral flow substrate further comprises a sample portion. The sample portion may be equivalent to, continuous with, or adjacent to the reagent portion. The lateral flow strip further comprises a first capture line, typically a horizontal line running across the device, but other configurations are possible. The first capture region is proximate to and on the same end of the lateral flow substrate as the sample loading portion. A first binding agent that specifically binds the first molecule of the reporter construct is fixed or otherwise immobilized to the first capture region. The second capture region is located towards the opposite end of the lateral flow substrate from the first binding region. A second binding agent is fixed or otherwise immobilized at the second capture region. The second binding agent specifically binds the second molecule of the reporter construct, or the second binding agent may bind a detectable ligand. For example, the detectable ligand may be a particle, such as a colloidal particle, that when it aggregates can be detected visually. The particle may be modified with an antibody that specifically binds the second molecule on the reporter construct. If the reporter construct is not cleaved it will facilitate accumulation of the detectable ligand at the first binding region. If the reporter construct is cleaved the detectable ligand is released to flow to the second binding region. In such an embodiment, the second binding agent is an agent capable of specifically or non-specifically binding the detectable ligand on the antibody on the detectable ligand. Examples of suitable binding agents for such an embodiment include, but are not limited to, protein A and protein G.

[0389] Lateral support substrates may be located within a housing (see for example, “Rapid Lateral Flow Test Strips” Merck Millipore 2013). The housing may comprise at least one opening for loading samples and a second single opening or separate openings that allow for reading of detectable signal generated at the first and second capture regions.

[0390] The SHERLOCK system may be freeze-dried to the lateral flow substrate and packaged as a ready to use device, or the SHERLOCK system may be added to the reagent portion of the lateral flow substrate at the time of using the device. Samples to be screened are loaded at the sample loading portion of the lateral flow substrate. The samples must be liquid samples or samples dissolved in an appropriate solvent, usually aqueous. The liquid sample reconstitutes the SHERLOCK reagents such that a SHERLOCK reaction can occur. The liquid sample begins to flow from the sample portion of the substrate towards the first and second capture regions. Intact reporter construct is bound at the first capture region by binding between the first binding agent and the first molecule. Likewise, the detection agent will begin to collect at the first binding region by binding to the second molecule on the intact reporter construct. If target molecule(s) are present in the sample, the CRISPR effector protein collateral effect is activated. As activated CRISPR effector protein comes into contact with the bound reporter construct, the reporter constructs are cleaved, releasing the second molecule to flow further down the lateral flow substrate towards the second binding region. The released second molecule is then captured at the second capture region by binding to the second binding agent, where additional detection agent may also accumulate by binding to the second molecule. Accordingly, if the target molecule(s) is not present in the sample, a detectable signal will appear at the first capture region, and if the target molecule(s) is present in the sample, a detectable signal will appear at the location of the second capture region.

[0391] Specific binding-integrating molecules comprise any members of binding pairs that can be used in the present invention. Such binding pairs are known to those skilled in the art and include, but are not limited to, antibody-antigen pairs, enzyme-substrate pairs, receptor-ligand pairs, and streptavidin-biotin. In addition to such known binding pairs, novel binding pairs may be specifically designed. A characteristic of binding pairs is the binding between the two members of the binding pair.

[0392] Oligonucleotide Linkers having molecules on either end may comprise DNA if the CRISPR effector protein has DNA collateral activity (Cpf1 and C2c1) or RNA if the CRISPR effector protein has RNA collateral activity. Oligonucleotide linkers may be single stranded or double stranded, and in certain embodiments, they could contain both RNA and DNA regions.

[0393] Oligonucleotide linkers may be of varying lengths, such as 5-10 nucleotides, 10-20 nucleotides, 20-50 nucleotides, or more.

[0394] In some embodiments, the polypeptide identifier elements include affinity tags, such as hemagglutinin (HA) tags, Myc tags, FLAG tags, V5 tags, chitin binding protein (CBP) tags, maltose-binding protein (MBP) tags, GST tags, poly-His tags, and fluorescent proteins (for example, green fluorescent protein (GFP), yellow fluorescent protein (YFP), cyan fluorescent protein (CFP), dsRed, mCherry, Kaede, Kindling, and derivatives thereof, FLAG tags, Myc tags, AU1 tags, T7 tags, OLLAS tags, Glu-Glu tags, VSV tags, or a combination thereof. Other Affinity tags are well known in the art. Such labels can be detected and/or isolated using methods known in the art (for example, by using specific binding agents, such as antibodies, that recognize a particular affinity tag). Such specific binding agents (for example, antibodies) can further contain, for example, detectable labels, such as isotope labels and/or nucleic acid barcodes such as those described herein.

[0395] For instance, a lateral flow strip allows for RNAse (e.g. Cas13a) detection by color. The RNA reporter is modified to have a first molecule (such as for instance FITC) attached to the 5′ end and a second molecule (such as for instance biotin) attached to the 3′ end (or vice versa). The lateral flow strip is designed to have two capture lines with anti-first molecule (e.g. anti-FITC) antibodies hybridized at the first line and anti-second molecule (e.g. anti-biotin) antibodies at the second downstream line. As the SHERLOCK reaction flows down the strip, uncleaved reporter will bind to anti-first molecule antibodies at the first capture line, while cleaved reporters will liberate the second molecule and allow second molecule binding at the second capture line. Second molecule sandwich antibodies, for instance conjugated to nanoparticles, such as gold nanoparticles, will bind any second molecule at the first or second line and result in a strong readout/signal (e.g. color). As more reporter is cleaved, more signal will accumulate at the second capture line and less signal will appear at the first line. In certain aspects, the invention relates to the use of a follow strip as described herein for detecting nucleic acids or polypeptides. In certain aspects, the invention relates to a method for detecting nucleic acids or polypeptides with a flow strip as defined herein, e.g. (lateral) flow tests or (lateral) flow immunochromatographic assays.

[0396] In certain example embodiments, a lateral flow device comprises a lateral flow substrate comprising a first end for application of a sample. The first region is loaded with a detectable ligand, such as those disclosed herein, for example a gold nanoparticle. The gold nanoparticle may be modified with a first antibody, such as an anti-FITC antibody. The first region also comprises a detection construct. In one example embodiment, a RNA detection construct and a CRISPR effector system (a CRISPR effector protein and one or more guide sequences configured to bind to one or more target sequences) as disclosed herein. In one example embodiment, and for purposes of further illustration, the RNA construct may comprise a FAM molecule on a first end of the detection construction and a biotin on a second end of the detection construct. Upstream of the flow of solution from the first end of the lateral flow substrate is a first test band. The test band may comprise a biotin ligand. Accordingly, when the RNA detection construct is present it its initial state, i.e. in the absence of target, the FAM molecule on the first end will bind the anti-FITC antibody on the gold nanoparticle, and the biotin on the second end of the RNA construct will bind the biotin ligand allowing for the detectable ligand to accumulate at the first test, generating a detectable signal. Generation of a detectable signal at the first band indicate the absence of the target ligand. In the presence of target, the CRISPR effector complex forms and the CRISPR effector protein is activated resulting in cleavage of the RND detection construct. In the absence of intact RNA detection construct the colloidal gold will flow past the second strip. The lateral flow device may comprise a second band, upstream of the first band. The second band may comprise a molecule capable of binding the antibody-labeled colloidal gold molecule, for example an anti-rabbit antibody capule of binding a rabbit anti-FTIC antibody on the colloidal gold. Therefore, in the presence of one or more targets, the detectable ligand will accumulate at the second band, indicating the presence of the one or more targets in the sample.

[0397] In certain example embodiments, the device is a microfluidic device that generates and/or merges different droplets (i.e. individual discrete volumes). For example, a first set of droplets may be formed containing samples to be screened and a second set of droplets formed containing the elements of the systems described herein. The first and second set of droplets are then merged and then diagnostic methods as described herein are carried out on the merged droplet set. Microfluidic devices disclosed herein may be silicone-based chips and may be fabricated using a variety of techniques, including, but not limited to, hot embossing, molding of elastomers, injection molding, LIGA, soft lithography, silicon fabrication and related thin film processing techniques. Suitable materials for fabricating the microfluidic devices include, but are not limited to, cyclic olefin copolymer (COC), polycarbonate, poly(dimethylsiloxane) (PDMS), and poly(methylacrylate) (PMMA). In one embodiment, soft lithography in PDMS may be used to prepare the microfluidic devices. For example, a mold may be made using photolithography which defines the location of flow channels, valves, and filters within a substrate. The substrate material is poured into a mold and allowed to set to create a stamp. The stamp is then sealed to a solid support, such as but not limited to, glass. Due to the hydrophobic nature of some polymers, such as PDMS, which absorbs some proteins and may inhibit certain biological processes, a passivating agent may be necessary (Schoffner et al. Nucleic Acids Research, 1996, 24:375-379). Suitable passivating agents are known in the art and include, but are not limited to, silanes, parylene, n-Dodecyl-b-D-matoside (DDM), pluronic, Tween-20, other similar surfactants, polyethylene glycol (PEG), albumin, collagen, and other similar proteins and peptides.

[0398] In certain example embodiments, the system and/or device may be adapted for conversion to a flow-cytometry readout in or allow to all of sensitive and quantitative measurements of millions of cells in a single experiment and improve upon existing flow-based methods, such as the PrimeFlow assay. In certain example embodiments, cells may be cast in droplets containing unpolymerized gel monomer, which can then be cast into single-cell droplets suitable for analysis by flow cytometry. A detection construct comprising a fluorescent detectable label may be cast into the droplet comprising unpolymerized gel monomer. Upon polymerization of the gel monomer to form a bead within a droplet. Because gel polymerization is through free-radical formation, the fluorescent reporter becomes covalently bound to the gel. The detection construct may be further modified to comprise a linker, such as an amine. A quencher may be added post-gel formation and will bind via the linker to the reporter construct. Thus, the quencher is not bound to the gel and is free to diffuse away when the reporter is cleaved by the CRISPR effector protein. Amplification of signal in droplet may be achieved by coupling the detection construct to a hybridization chain reaction (HCR initiator) amplification. DNA/RNA hybrid hairpins may be incorporated into the gel which may comprise a hairpin loop that has a RNase sensitive domain. By protecting a strand displacement toehold within a hairpin loop that has a RNase sensitive domain, HCR initiators may be selectively deprotected following cleavage of the hairpin loop by the CRISPR effector protein. Following deprotection of HCR initiators via toehold mediated strand displacement, fluorescent HCR monomers may be washed into the gel to enable signal amplification where the initiators are deprotected.

[0399] An example of microfluidic device that may be used in the context of the invention is described in Hour et al. “Direct Detection and drug-resistance profiling of bacteremias using inertial microfluidics” Lap Chip. 15(10):2297-2307 (2016).

[0400] In systems described herein, may further be incorporated into wearable medical devices that assess biological samples, such as biological fluids, of a subject outside the clinic setting and report the outcome of the assay remotely to a central server accessible by a medical care professional. The device may include the ability to self-sample blood, such as the devices disclosed in U.S. Patent Application Publication No. 2015/0342509 entitled “Needle-free Blood Draw to Peeters et al., U.S. Patent Application Publication No. 2015/0065821 entitled “Nanoparticle Phoresis” to Andrew Conrad.

[0401] In some embodiments, the individual discrete volumes are microwells.

[0402] In certain example embodiments, the device may comprise individual wells, such as microplate wells. The size of the microplate wells may be the size of standard 6, 24, 96, 384, 1536, 3456, or 9600 sized wells. In certain example embodiments, the elements of the systems described herein may be freeze dried and applied to the surface of the well prior to distribution and use.

[0403] The devices disclosed herein may further comprise inlet and outlet ports, or openings, which in turn may be connected to valves, tubes, channels, chambers, and syringes and/or pumps for the introduction and extraction of fluids into and from the device. The devices may be connected to fluid flow actuators that allow directional movement of fluids within the microfluidic device. Example actuators include, but are not limited to, syringe pumps, mechanically actuated recirculating pumps, electroosmotic pumps, bulbs, bellows, diaphragms, or bubbles intended to force movement of fluids. In certain example embodiments, the devices are connected to controllers with programmable valves that work together to move fluids through the device. In certain example embodiments, the devices are connected to the controllers discussed in further detail below. The devices may be connected to flow actuators, controllers, and sample loading devices by tubing that terminates in metal pins for insertion into inlet ports on the device.

[0404] As shown herein the elements of the system are stable when freeze dried, therefore embodiments that do not require a supporting device are also contemplated, i.e. the system may be applied to any surface or fluid that will support the reactions disclosed herein and allow for detection of a positive detectable signal from that surface or solution. In addition to freeze-drying, the systems may also be stably stored and utilized in a pelletized form. Polymers useful in forming suitable pelletized forms are known in the art.

[0405] In some embodiments, the individual discrete volumes are defined on a solid substrate. In some embodiments, the individual discrete volumes are spots defined on a substrate. In some embodiments, the substrate may be a flexible materials substrate, for example, including, but not limited to, a paper substrate, a fabric substrate, or a flexible polymer-based substrate. In specific embodiments, the flexible materials substrate is a paper substrate or a flexible polymer based substrate.

[0406] In certain embodiments, the CRISPR effector protein is bound to each discrete volume in the device. Each discrete volume may comprise a different guide RNA specific for a different target molecule. In certain embodiments, a sample is exposed to a solid substrate comprising more than one discrete volume each comprising a guide RNA specific for a target molecule. Not being bound by a theory, each guide RNA will capture its target molecule from the sample and the sample does not need to be divided into separate assays. Thus, a valuable sample may be preserved. The effector protein may be a fusion protein comprising an affinity tag. Affinity tags are well known in the art (e.g., HA tag, Myc tag, Flag tag, His tag, biotin). The effector protein may be linked to a biotin molecule and the discrete volumes may comprise streptavidin. In other embodiments, the CRISPR effector protein is bound by an antibody specific for the effector protein. Methods of binding a CRISPR enzyme has been described previously (see, e.g., US20140356867A1).

[0407] The devices disclosed herein may also include elements of point of care (POC) devices known in the art for analyzing samples by other methods. See, for example St John and Price, “Existing and Emerging Technologies for Point-of-Care Testing” (Clin Biochem Rev. 2014 August; 35(3): 155-167).

[0408] The present invention may be used with a wireless lab-on-chip (LOC) diagnostic sensor system (see e.g., U.S. Pat. No. 9,470,699 “Diagnostic radio frequency identification sensors and applications thereof”). In certain embodiments, the present invention is performed in a LOC controlled by a wireless device (e.g., a cell phone, a personal digital assistant (PDA), a tablet) and results are reported to said device.

[0409] Radio frequency identification (RFID) tag systems include an RFID tag that transmits data for reception by an RFID reader (also referred to as an interrogator). In a typical RFID system, individual objects (e.g., store merchandise) are equipped with a relatively small tag that contains a transponder. The transponder has a memory chip that is given a unique electronic product code. The RFID reader emits a signal activating the transponder within the tag through the use of a communication protocol. Accordingly, the RFID reader is capable of reading and writing data to the tag. Additionally, the RFID tag reader processes the data according to the RFID tag system application. Currently, there are passive and active type RFID tags. The passive type RFID tag does not contain an internal power source, but is powered by radio frequency signals received from the RFID reader. Alternatively, the active type RFID tag contains an internal power source that enables the active type RFID tag to possess greater transmission ranges and memory capacity. The use of a passive versus an active tag is dependent upon the particular application.

[0410] Lab-on-the chip technology is well described in the scientific literature and consists of multiple microfluidic channels, input or chemical wells. Reactions in wells can be measured using radio frequency identification (RFID) tag technology since conductive leads from RFID electronic chip can be linked directly to each of the test wells. An antenna can be printed or mounted in another layer of the electronic chip or directly on the back of the device. Furthermore, the leads, the antenna and the electronic chip can be embedded into the LOC chip, thereby preventing shorting of the electrodes or electronics. Since LOC allows complex sample separation and analyses, this technology allows LOC tests to be done independently of a complex or expensive reader. Rather a simple wireless device such as a cell phone or a PDA can be used. In one embodiment, the wireless device also controls the separation and control of the microfluidics channels for more complex LOC analyses. In one embodiment, a LED and other electronic measuring or sensing devices are included in the LOC-RFID chip. Not being bound by a theory, this technology is disposable and allows complex tests that require separation and mixing to be performed outside of a laboratory.

[0411] In preferred embodiments, the LOC may be a microfluidic device. The LOC may be a passive chip, wherein the chip is powered and controlled through a wireless device. In certain embodiments, the LOC includes a microfluidic channel for holding reagents and a channel for introducing a sample. In certain embodiments, a signal from the wireless device delivers power to the LOC and activates mixing of the sample and assay reagents. Specifically, in the case of the present invention, the system may include a masking agent, CRISPR effector protein, and guide RNAs specific for a target molecule. Upon activation of the LOC, the microfluidic device may mix the sample and assay reagents. Upon mixing, a sensor detects a signal and transmits the results to the wireless device. In certain embodiments, the unmasking agent is a conductive RNA molecule. The conductive RNA molecule may be attached to the conductive material. Conductive molecules can be conductive nanoparticles, conductive proteins, metal particles that are attached to the protein or latex or other beads that are conductive. In certain embodiments, if DNA or RNA is used then the conductive molecules can be attached directly to the matching DNA or RNA strands. The release of the conductive molecules may be detected across a sensor. The assay may be a one step process.

[0412] Since the electrical conductivity of the surface area can be measured precisely quantitative results are possible on the disposable wireless RFID electro-assays. Furthermore, the test area can be very small allowing for more tests to be done in a given area and therefore resulting in cost savings. In certain embodiments, separate sensors each associated with a different CRISPR effector protein and guide RNA immobilized to a sensor are used to detect multiple target molecules. Not being bound by a theory, activation of different sensors may be distinguished by the wireless device.

[0413] In addition to the conductive methods described herein, other methods may be used that rely on RFID or Bluetooth as the basic low cost communication and power platform for a disposable RFID assay. For example, optical means may be used to assess the presence and level of a given target molecule. In certain embodiments, an optical sensor detects unmasking of a fluorescent masking agent.

[0414] In certain embodiments, the device of the present invention may include handheld portable devices for diagnostic reading of an assay (see e.g., Vashist et al., Commercial Smartphone-Based Devices and Smart Applications for Personalized Healthcare Monitoring and Management, Diagnostics 2014, 4(3), 104-128; mReader from Mobile Assay; and Holomic Rapid Diagnostic Test Reader).

[0415] As noted herein, certain embodiments allow detection via colorimetric change which has certain attendant benefits when embodiments are utilized in POC situations and or in resource poor environments where access to more complex detection equipment to readout the signal may be limited. However, portable embodiments disclosed herein may also be coupled with hand-held spectrophotometers that enable detection of signals outside the visible range. An example of a hand-held spectrophotometer device that may be used in combination with the present invention is described in Das et al. “Ultra-portable, wireless smartphone spectrophotometer for rapid, non-destructive testing of fruit ripeness.” Nature Scientific Reports. 2016, 6:32504, DOI: 10.1038/srep32504. Finally, in certain embodiments utilizing quantum dot-based masking constructs, use of a hand held UV light, or other suitable device, may be successfully used to detect a signal owing to the near complete quantum yield provided by quantum dots.

### Methods for Detecting Target Nucleic Acids

[0416] The low cost and adaptability of the assay platform lends itself to a number of applications including (i) general RNA/DNA/protein quantitation, (ii) rapid, multiplexed RNA/DNA and protein expression detection, and (iii) sensitive detection of target nucleic acids, peptides, and proteins in both clinical and environmental samples. Additionally, the systems disclosed herein may be adapted for detection of transcripts within biological settings, such as cells. Given the highly specific nature of the CRISPR effectors described herein, it may possible to track allelic specific expression of transcripts or disease-associated mutations in live cells.

[0417] In some embodiments, methods include detecting target nucleic acids in samples, comprising distributing a sample or set of samples into one or more individual discrete volumes comprising a CRISPR system as described hereinof. The sample or set of samples may then be incubated under conditions sufficient to allow binding of the one or more guide RNAs to one or more target molecules, and the CRISPR effector protein may be activated via binding of the one or more guide RNAs to the one or more target molecules, wherein activating the CRISPR effector protein results in modification of the RNA-based masking construct such that a detectable positive signal is generated. The one or more detectable positive signals may then be detected, with detection indicating the presence of one or more target molecules in the sample.

[0418] In some embodiments, methods of the invention include detecting polypeptides in samples, comprising distributing a sample or set of samples into a set of individual discrete volumes comprising peptide detection aptamers and a CRISPR system as described herein. The sample or set of samples may then be incubated under conditions sufficient to allow binding of the peptide detection aptamers to the one or more target molecules, wherein binding of the aptamer to a corresponding target molecule exposes the RNA polymerase binding site or primer binding site resulting in generation of a trigger RNA. The RNA effector protein may then be activated via binding of the one or more guide RNAs to the trigger RNA, wherein activating the RNA effector protein results in modification of the RNA-based masking construct such that a detectable positive signal is produced. The detectable positive signal may then be detected, with detection of the detectable positive signal indicating the presence of one or more target molecules in a sample.

[0419] In certain example embodiments, a single guide sequence specific to a single target is placed in separate volumes. Each volume may then receive a different sample or aliquot of the same sample. In certain example embodiments, multiple guide sequences each to separate target may be placed in a single well such that multiple targets may be screened in a different well. In order to detect multiple guide RNAs in a single volume, in certain example embodiments, multiple effector proteins with different specificities may be used.

[0420] In embodiments, different orthologs with different sequence specificities may be used. Cutting motifs may be used to take advantage of the sequence specificities of different orthologs. The masking construct can comprise a cutting motif preferentially cut by a Cas protein. A cutting motif sequence can be a particular nucleotide base, a repeat nucleotide base in a homopolymer, or a heteropolymer of bases. The cutting motif can be a dinucleotide sequence, a trinucleotide sequence or more complex motifs comprising 4, 5, 6, 7, 8, 9, or 10 nucleotide motifs. For example, one orthologue may preferentially cut A, while others preferentially cut C, G, U/T. Accordingly, masking constructs completely comprising, or comprised of a substantial portion, of a single nucleotide may be generated, each with a different fluorophore that can be detected at differing wavelengths. In this way up to four different targets may be screened in a single individual discrete volume. In certain example embodiments, different orthologues from a same class of CRISPR effector protein may be used, such as two Cas13a orthologues, two Cas13b orthologues, or two Cas13c orthologues. The nucleotide preferences of various Cas13 proteins is shown in FIG. 67. In certain other example embodiments, different orthologues with different nucleotide editing preferences may be used such as a Cas13a and Cas13b orthologs, or a Cas13a and a Cas13c orthologs, or a Cas13b orthologs and a Cas13c orthologs etc. In certain example embodiments, a Cas13 protein with a polyU preference and a Cas13 protein with a polyA preference are used. In certain example embodiments, the Cas13 protein with a polyU preference is a Prevotella intermedia Cas13b, and the Cas13 protein with a polyA preference is a Prevotella sp. MA2106 Cas13b protein (PsmCas13b). In certain example embodiments, the Cas13 protein with a polyU preference is a Leptotrichia wadei Cas13a (LwaCas13a) protein and the Cas13 protein with a poly A preference is a Prevotella sp. MA2106 Cas13b protein. In certain example embodiments, the Cas13 protein with a polyU preference is Capnocytophaga canimorsus Cas13b protein (CcaCas13b).

[0421] In addition to single base editing preferences, additional detection constructs can be designed based on other motif cutting preferences of Cas13 and Cas12 orthologs. For example, Cas13 or Cas12 orthologs may preferentially cut a dinucleotide sequence, a trinucleotide sequence or more complex motifs comprising 4, 5, 6, 7, 8, 9, or 10 nucleotide motifs. As an example, LwaCas13a showed strong preference for a hexanucleotide motif sequences, with CcaCas13b showing strong preference for other hexanucleotide motifs, as shown in FIG. 89D. Thus the upper bound for multiplex assays using the embodiments disclosed herein is primarily limited by the number of distinguishable detectable labels and the detection channels needed to detect them. In certain example embodiments, 2, 3, 4, 5, 6, 7, 8, 9, 10, 11, 12, 13, 14, 15, 16, 17, 18, 19, 20, 21, 22, 23, 24, 25, 25, 27, 28, 29, or 30 different targets are detected. Example methods for identifying such motifs are further disclosed in the Working Examples below.

[0422] As demonstrated herein, the CRISPR effector systems are capable of detecting down to attomolar concentrations of target molecules. See e.g. FIGS. 13, 14, 19, 22 and the Working Examples described below. Due to the sensitivity of said systems, a number of applications that require rapid and sensitive detection may benefit from the embodiments disclosed herein, and are contemplated to be within the scope of the invention. Example assays and applications are described in further detail below.

[0423] In specific embodiments, the target molecule may be a target DNA and the method may further comprise binding the target DNA with a primer comprising an RNA polymerase site, as described herein.

[0424] In specific embodiments, the one or more guide RNAs may be designed to detect a single nucleotide polymorphism in a target RNA or DNA, or a splice variant of an RNA transcript.

[0425] Specific embodiments involve amplifying the sample RNA or the trigger RNA as described herein. As described in detail herein, methods for amplifying RNA include, but are not necessarily limited to, NASBA, RPA, LAMP, SDA, HDA, NEAR, PCR, MDA, RCA, LCR, or RAM. In specific embodiments, RNA may be amplified by NASBA or RPA.

[0426] A sample for use with the invention may be a biological or environmental sample, such as a food sample (fresh fruits or vegetables, meats), a beverage sample, a paper surface, a fabric surface, a metal surface, a wood surface, a plastic surface, a soil sample, a freshwater sample, a wastewater sample, a saline water sample, exposure to atmospheric air or other gas sample, or a combination thereof. For example, household/commercial/industrial surfaces made of any materials including, but not limited to, metal, wood, plastic, rubber, or the like, may be swabbed and tested for contaminants. Soil samples may be tested for the presence of pathogenic bacteria or parasites, or other microbes, both for environmental purposes and/or for human, animal, or plant disease testing. Water samples such as freshwater samples, wastewater samples, or saline water samples can be evaluated for cleanliness and safety, and/or potability, to detect the presence of, for example, Cryptosporidium parvum, Giardia lamblia, or other microbial contamination. In further embodiments, a biological sample may be obtained from a source including, but not limited to, a tissue sample, saliva, blood, plasma, sera, stool, urine, sputum, mucous, lymph, synovial fluid, cerebrospinal fluid, ascites, pleural effusion, seroma, pus, bile, aqueous or vitreous humor, transudate, exudate, or swab of skin or a mucosal membrane surface. In some particular embodiments, an environmental sample or biological samples may be crude samples and/or the one or more target molecules may not be purified or amplified from the sample prior to application of the method. Identification of microbes may be useful and/or needed for any number of applications, and thus any type of sample from any source deemed appropriate by one of skill in the art may be used in accordance with the invention.

[0427] In some embodiments, the one or more guide RNAs may be designed to bind to cell free nucleic acids. In some embodiments, the one or more guide RNAs may be designed to detect a single nucleotide polymorphism in a target RNA or DNA, or a splice variant of an RNA transcript. In some embodiments, the one or more guide RNAs are designed to bind to one or more target molecules that are diagnostic for a disease state, as described herein.

[0428] In some embodiments, the disease state may be an infection, an organ disease, a blood disease, an immune system disease, a cancer, a brain and nervous system disease, an endocrine disease, a pregnancy or childbirth-related disease, an inherited disease, or an environmentally-acquired disease.

[0429] In certain example embodiments, the systems, devices, and methods, disclosed herein are directed to detecting the presence of one or more microbial agents in a sample, such as a biological sample obtained from a subject. In certain example embodiments, the microbe may be a bacterium, a fungus, a yeast, a protozoa, a parasite, or a virus. Accordingly, the methods disclosed herein can be adapted for use in other methods (or in combination) with other methods that require quick identification of microbe species, monitoring the presence of microbial proteins (antigens), antibodies, antibody genes, detection of certain phenotypes (e.g. bacterial resistance), monitoring of disease progression and/or outbreak, and antibiotic screening. Because of the rapid and sensitive diagnostic capabilities of the embodiments disclosed here, detection of microbe species type, down to a single nucleotide difference, and the ability to be deployed as a POC device, the embodiments disclosed herein may be used guide therapeutic regimens, such as selection of the appropriate antibiotic or antiviral. The embodiments disclosed herein may also be used to screen environmental samples (air, water, surfaces, food etc.) for the presence of microbial contamination.

[0430] Disclosed is a method to identify microbial species, such as bacterial, viral, fungal, yeast, or parasitic species, or the like. Particular embodiments disclosed herein describe methods and systems that will identify and distinguish microbial species within a single sample, or across multiple samples, allowing for recognition of many different microbes. The present methods allow the detection of pathogens and distinguishing between two or more species of one or more organisms, e.g., bacteria, viruses, yeast, protozoa, and fungi or a combination thereof, in a biological or environmental sample, by detecting the presence of a target nucleic acid sequence in the sample. A positive signal obtained from the sample indicates the presence of the microbe. Multiple microbes can be identified simultaneously using the methods and systems of the invention, by employing the use of more than one effector protein, wherein each effector protein targets a specific microbial target sequence. In this way, a multi-level analysis can be performed for a particular subject in which any number of microbes can be detected at once. In some embodiments, simultaneous detection of multiple microbes may be performed using a set of probes that can identify one or more microbial species.

[0431] Multiplex analysis of samples enables large-scale detection of samples, reducing the time and cost of analyses. However, multiplex analyses are often limited by the availability of a biological sample. In accordance with the invention, however, alternatives to multiplex analysis may be performed such that multiple effector proteins can be added to a single sample and each masking construct may be combined with a separate quencher dye. In this case, positive signals may be obtained from each quencher dye separately for multiple detection in a single sample.

[0432] Disclosed herein are methods for distinguishing between two or more species of one or more organisms in a sample. The methods are also amenable to detecting one or more species of one or more organisms in a sample.

[0433] In some embodiments, the methods provide for detection of disease states that are characterized by the presence or absence of an antibiotic or drug resistance or susceptibility gene or transcript or polypeptide, preferably in a pathogen or a cell.

[0434] In certain embodiments, the method may further comprise comparing the detectable positive signal with a synthetic standard signal, such as for instance illustrated in an example embodiment in FIG. 60, and as is described in detail herein elsewhere.

### Microbe Detection

[0435] In some embodiments, a method for detecting microbes in samples is provided comprising distributing a sample or set of samples into one or more individual discrete volumes, the individual discrete volumes comprising a CRISPR system as described herein; incubating the sample or set of samples under conditions sufficient to allow binding of the one or more guide RNAs to one or more microbe-specific targets; activating the CRISPR effector protein via binding of the one or more guide RNAs to the one or more target molecules, wherein activating the CRISPR effector protein results in modification of the RNA-based masking construct such that a detectable positive signal is generated; and detecting the detectable positive signal, wherein detection of the detectable positive signal indicates a presence of one or more target molecules in the sample. The one or more target molecules may be mRNA, gDNA (coding or non-coding), trRNA, or rRNA comprising a target nucleotide tide sequence that may be used to distinguish two or more microbial species/strains from one another. The guide RNAs may be designed to detect target sequences. The embodiments disclosed herein may also utilize certain steps to improve hybridization between guide RNA and target RNA sequences. Methods for enhancing ribonucleic acid hybridization are disclosed in WO 2015/085194, entitled “Enhanced Methods of Ribonucleic Acid Hybridization” which is incorporated herein by reference. The microbe-specific target may be RNA or DNA or a protein. If DNA method may further comprise the use of DNA primers that introduce a RNA polymerase promoter as described herein. If the target is a protein than the method will utilized aptamers and steps specific to protein detection described herein.

### Detection of Single Nucleotide Variants

[0436] In some embodiments, one or more identified target sequences may be detected using guide RNAs that are specific for and bind to the target sequence as described herein. The systems and methods of the present invention can distinguish even between single nucleotide polymorphisms (SNPs) present among different microbial species and therefore, use of multiple guide RNAs in accordance with the invention may further expand on or improve the number of target sequences that may be used to distinguish between species. For example, in some embodiments, the one or more guide RNAs may distinguish between microbes at the species, genus, family, order, class, phylum, kingdom, or phenotype, or a combination thereof.

Detection Based on rRNA Sequences

[0437] In certain example embodiments, the devices, systems, and methods disclosed herein may be used to distinguish multiple microbial species in a sample. In certain example embodiments, identification may be based on ribosomal RNA sequences, including the 16S, 23S, and 5S subunits. Methods for identifying relevant rRNA sequences are disclosed in U.S. Patent Application Publication No. 2017/0029872. In certain example embodiments, a set of guide RNA may designed to distinguish each species by a variable region that is unique to each species or strain. Guide RNAs may also be designed to target RNA genes that distinguish microbes at the genus, family, order, class, phylum, kingdom levels, or a combination thereof. In certain example embodiments where amplification is used, a set of amplification primers may be designed to flanking constant regions of the ribosomal RNA sequence and a guide RNA designed to distinguish each species by a variable internal region. In certain example embodiments, the primers and guide RNAs may be designed to conserved and variable regions in the 16S subunit respectfully. Other genes or genomic regions that uniquely variable across species or a subset of species such as the RecA gene family, RNA polymerase β subunit, may be used as well. Other suitable phylogenetic markers, and methods for identifying the same, are discussed for example in Wu et al. arXiv:1307.8690 [q-bio.GN].

[0438] In certain example embodiments, a method or diagnostic is designed to screen microbes across multiple phylogenetic and/or phenotypic levels at the same time. For example, the method or diagnostic may comprise the use of multiple CRISPR systems with different guide RNAs. A first set of guide RNAs may distinguish, for example, between mycobacteria, gram positive, and gram negative bacteria. These general classes can be even further subdivided. For example, guide RNAs could be designed and used in the method or diagnostic that distinguish enteric and non-enteric within gram negative bacteria. A second set of guide RNA can be designed to distinguish microbes at the genus or species level. Thus a matrix may be produced identifying all mycobacteria, gram positive, gram negative (further divided into enteric and non-enteric) with each genus of species of bacteria identified in a given sample that fall within one of those classes. The foregoing is for example purposes only. Other means for classifying other microbe types are also contemplated and would follow the general structure described above.

### Screening for Drug Resistance

[0439] In certain example embodiments, the devices, systems and methods disclosed herein may be used to screen for microbial genes of interest, for example antibiotic and/or antiviral resistance genes. Guide RNAs may be designed to distinguish between known genes of interest. Samples, including clinical samples, may then be screened using the embodiments disclosed herein for detection of such genes. The ability to screen for drug resistance at POC would have tremendous benefit in selecting an appropriate treatment regime. In certain example embodiments, the antibiotic resistance genes are carbapenemases including KPC, NDM1, CTX-M15, OXA-48. Other antibiotic resistance genes are known and may be found for example in the Comprehensive Antibiotic Resistance Database (Jia et al. “CARD 2017: expansion and model-centric curation of the Comprehensive Antibiotic Resistance Database.” Nucleic Acids Research, 45, D566-573).

[0440] Ribavirin is an effective antiviral that hits a number of RNA viruses. Several clinically important viruses have evolved ribavirin resistance including Foot and Mouth Disease Virus doi:10.1128/JVI.03594-13; polio virus (Pfeifer and Kirkegaard. PNAS, 100(12):7289-7294, 2003); and hepatitis C virus (Pfeiffer and Kirkegaard, J. Virol. 79(4):2346-2355, 2005). A number of other persistent RNA viruses, such as hepatitis and HIV, have evolved resistance to existing antiviral drugs: hepatitis B virus (lamivudine, tenofovir, entecavir) doi:10/1002/hep22900; hepatitis C virus (telaprevir, BILN2061, ITMN-191, SCh6, boceprevir, AG-021541, ACH-806) doi:10.1002/hep.22549; and HIV (many drug resistance mutations) hivb.standford.edu. The embodiments disclosed herein may be used to detect such variants among others.

[0441] Aside from drug resistance, there are a number of clinically relevant mutations that could be detected with the embodiments disclosed herein, such as persistent versus acute infection in LCMV (doi:10.1073/pnas.1019304108), and increased infectivity of Ebola (Diehl et al. Cell. 2016, 167(4):1088-1098.

[0442] As described herein elsewhere, closely related microbial species (e.g. having only a single nucleotide difference in a given target sequence) may be distinguished by introduction of a synthetic mismatch in the gRNA.

### Set Cover Approaches

[0443] In particular embodiments, a set of guide RNAs is designed that can identify, for example, all microbial species within a defined set of microbes. In certain example embodiments, the methods for generating guide RNAs as described herein may be compared to methods disclosed in WO 2017/040316, incorporated herein by reference. As described in WO 2017040316, a set cover solution may identify the minimal number of target sequences probes or guide RNAs needed to cover an entire target sequence or set of target sequences, e.g. a set of genomic sequences. Set cover approaches have been used previously to identify primers and/or microarray probes, typically in the 20 to 50 base pair range. See, e.g. Pearson et al., cs.virginia.edu/˜robins/papers/primers_dam11_final.pdf., Jabado et al. Nucleic Acids Res. 2006 34(22):6605-11, Jabado et al. Nucleic Acids Res. 2008, 36(1):e3 doi10.1093/nar/gkm1106, Duitama et al. Nucleic Acids Res. 2009, 37(8):2483-2492, Phillippy et al. BMC Bioinformatics. 2009, 10:293 doi:10.1186/1471-2105-10-293. However, such approaches generally involved treating each primer/probe as k-mers and searching for exact matches or allowing for inexact matches using suffix arrays. In addition, the methods generally take a binary approach to detecting hybridization by selecting primers or probes such that each input sequence only needs to be bound by one primer or probe and the position of this binding along the sequence is irrelevant. Alternative methods may divide a target genome into pre-defined windows and effectively treat each window as a separate input sequence under the binary approach—i.e. they determine whether a given probe or guide RNA binds within each window and require that all of the windows be bound by the state of some probe or guide RNA. Effectively, these approaches treat each element of the “universe” in the set cover problem as being either an entire input sequence or a pre-defined window of an input sequence, and each element is considered “covered” if the start of a probe or guide RNA binds within the element. These approaches limit the fluidity to which different probe or guide RNA designs are allowed to cover a given target sequence.

[0444] In contrast, the embodiments disclosed herein are directed to detecting longer probe or guide RNA lengths, for example, in the range of 70 bp to 200 bp that are suitable for hybrid selection sequencing. In addition, the methods disclosed WO 2017/040316 herein may be applied to take a pan-target sequence approach capable of defining a probe or guide RNA sets that can identify and facilitate the detection sequencing of all species and/or strains sequences in a large and/or variable target sequence set. For example, the methods disclosed herein may be used to identify all variants of a given virus, or multiple different viruses in a single assay. Further, the method disclosed herein treat each element of the “universe” in the set cover problem as being a nucleotide of a target sequence, and each element is considered “covered” as long as a probe or guide RNA binds to some segment of a target genome that includes the element. These type of set cover methods may be used instead of the binary approach of previous methods, the methods disclosed in herein better model how a probe or guide RNA may hybridize to a target sequence. Rather than only asking if a given guide RNA sequence does or does not bind to a given window, such approaches may be used to detect a hybridization pattern—i.e. where a given probe or guide RNA binds to a target sequence or target sequences—and then determines from those hybridization patterns the minimum number of probes or guide RNAs needed to cover the set of target sequences to a degree sufficient to enable both enrichment from a sample and sequencing of any and all target sequences. These hybridization patterns may be determined by defining certain parameters that minimize a loss function, thereby enabling identification of minimal probe or guide RNA sets in a way that allows parameters to vary for each species, e.g. to reflect the diversity of each species, as well as in a computationally efficient manner that cannot be achieved using a straightforward application of a set cover solution, such as those previously applied in the probe or guide RNA design context.

[0445] The ability to detect multiple transcript abundances may allow for the generation of unique microbial signatures indicative of a particular phenotype. Various machine learning techniques may be used to derive the gene signatures. Accordingly, the guide RNAs of the CRISPR systems may be used to identify and/or quantitate relative levels of biomarkers defined by the gene signature in order to detect certain phenotypes. In certain example embodiments, the gene signature indicates susceptibility to an antibiotic, resistance to an antibiotic, or a combination thereof.

[0446] In one aspect of the invention, a method comprises detecting one or more pathogens. In this manner, differentiation between infection of a subject by individual microbes may be obtained. In some embodiments, such differentiation may enable detection or diagnosis by a clinician of specific diseases, for example, different variants of a disease. Preferably the pathogen sequence is a genome of the pathogen or a fragment thereof. The method further may comprise determining the evolution of the pathogen. Determining the evolution of the pathogen may comprise identification of pathogen mutations, e.g. nucleotide deletion, nucleotide insertion, nucleotide substitution. Amongst the latter, there are non-synonymous, synonymous, and noncoding substitutions. Mutations are more frequently non-synonymous during an outbreak. The method may further comprise determining the substitution rate between two pathogen sequences analyzed as described above. Whether the mutations are deleterious or even adaptive would require functional analysis, however, the rate of non-synonymous mutations suggests that continued progression of this epidemic could afford an opportunity for pathogen adaptation, underscoring the need for rapid containment. Thus, the method may further comprise assessing the risk of viral adaptation, wherein the number non-synonymous mutations is determined. (Gire, et al., Science 345, 1369, 2014).

### Monitoring Microbe Outbreaks

[0447] In some embodiments, a CRISPR system or methods of use thereof as described herein may be used to determine the evolution of a pathogen outbreak. The method may comprise detecting one or more target sequences from a plurality of samples from one or more subjects, wherein the target sequence is a sequence from a microbe causing the outbreaks. Such a method may further comprise determining a pattern of pathogen transmission, or a mechanism involved in a disease outbreak caused by a pathogen.

[0448] The pattern of pathogen transmission may comprise continued new transmissions from the natural reservoir of the pathogen or subject-to-subject transmissions (e.g. human-to-human transmission) following a single transmission from the natural reservoir or a mixture of both. In one embodiment, the pathogen transmission may be bacterial or viral transmission, in such case, the target sequence is preferably a microbial genome or fragments thereof. In one embodiment, the pattern of the pathogen transmission is the early pattern of the pathogen transmission, i.e. at the beginning of the pathogen outbreak. Determining the pattern of the pathogen transmission at the beginning of the outbreak increases likelihood of stopping the outbreak at the earliest possible time thereby reducing the possibility of local and international dissemination.

[0449] Determining the pattern of the pathogen transmission may comprise detecting a pathogen sequence according to the methods described herein. Determining the pattern of the pathogen transmission may further comprise detecting shared intra-host variations of the pathogen sequence between the subjects and determining whether the shared intra-host variations show temporal patterns. Patterns in observed intrahost and interhost variation provide important insight about transmission and epidemiology (Gire, et al., 2014).

[0450] Detection of shared intra-host variations between the subjects that show temporal patterns is an indication of transmission links between subject (in particular between humans) because it can be explained by subject infection from multiple sources (superinfection), sample contamination recurring mutations (with or without balancing selection to reinforce mutations), or co-transmission of slightly divergent viruses that arose by mutation earlier in the transmission chain (Park, et al., Cell 161(7):1516-1526, 2015). Detection of shared intra-host variations between subjects may comprise detection of intra-host variants located at common single nucleotide polymorphism (SNP) positions. Positive detection of intra-host variants located at common (SNP) positions is indicative of superinfection and contamination as primary explanations for the intra-host variants. Superinfection and contamination can be parted on the basis of SNP frequency appearing as inter-host variants (Park, et al., 2015). Otherwise superinfection and contamination can be ruled out. In this latter case, detection of shared intra-host variations between subjects may further comprise assessing the frequencies of synonymous and nonsynonymous variants and comparing the frequency of synonymous and nonsynonymous variants to one another. A nonsynonymous mutation is a mutation that alters the amino acid of the protein, likely resulting in a biological change in the microbe that is subject to natural selection. Synonymous substitution does not alter an amino acid sequence. Equal frequency of synonymous and nonsynonymous variants is indicative of the intra-host variants evolving neutrally. If frequencies of synonymous and nonsynonymous variants are divergent, the intra-host variants are likely to be maintained by balancing selection. If frequencies of synonymous and nonsynonymous variants are low, this is indicative of recurrent mutation. If frequencies of synonymous and nonsynonymous variants are high, this is indicative of co-transmission (Park, et al., 2015).

[0451] Like Ebola virus, Lassa virus (LASV) can cause hemorrhagic fever with high case fatality rates. Andersen et al. generated a genomic catalog of almost 200 LASV sequences from clinical and rodent reservoir samples (Andersen, et al., Cell Volume 162, Issue 4, p 738-750, 13 Aug. 2015). Andersen et al. show that whereas the 2013-2015 EVD epidemic is fueled by human-to-human transmissions, LASV infections mainly result from reservoir-to-human infections. Andersen et al. elucidated the spread of LASV across West Africa and show that this migration was accompanied by changes in LASV genome abundance, fatality rates, codon adaptation, and translational efficiency. The method may further comprise phylogenetically comparing a first pathogen sequence to a second pathogen sequence, and determining whether there is a phylogenetic link between the first and second pathogen sequences. The second pathogen sequence may be an earlier reference sequence. If there is a phylogenetic link, the method may further comprise rooting the phylogeny of the first pathogen sequence to the second pathogen sequence. Thus, it is possible to construct the lineage of the first pathogen sequence. (Park, et al., 2015).

[0452] The method may further comprise determining whether the mutations are deleterious or adaptive. Deleterious mutations are indicative of transmission-impaired viruses and dead-end infections, thus normally only present in an individual subject. Mutations unique to one individual subject are those that occur on the external branches of the phylogenetic tree, whereas internal branch mutations are those present in multiple samples (i.e. in multiple subjects). Higher rate of nonsynonymous substitution is a characteristic of external branches of the phylogenetic tree (Park, et al., 2015).

[0453] In internal branches of the phylogenetic tree, selection has had more opportunity to filter out deleterious mutants. Internal branches, by definition, have produced multiple descendent lineages and are thus less likely to include mutations with fitness costs. Thus, lower rate of nonsynonymous substitution is indicative of internal branches (Park, et al., 2015).

[0454] Synonymous mutations, which likely have less impact on fitness, occurred at more comparable frequencies on internal and external branches (Park, et al., 2015).

[0455] By analyzing the sequenced target sequence, such as viral genomes, it is possible to discover the mechanisms responsible for the severity of the epidemic episode such as during the 2014 Ebola outbreak. For example, Gire et al. made a phylogenetic comparison of the genomes of the 2014 outbreak to all 20 genomes from earlier outbreaks suggests that the 2014 West African virus likely spread from central Africa within the past decade. Rooting the phylogeny using divergence from other ebolavirus genomes was problematic (6, 13). However, rooting the tree on the oldest outbreak revealed a strong correlation between sample date and root-to-tip distance, with a substitution rate of 8×10-4 per site per year (13). This suggests that the lineages of the three most recent outbreaks all diverged from a common ancestor at roughly the same time, around 2004, which supports the hypothesis that each outbreak represents an independent zoonotic event from the same genetically diverse viral population in its natural reservoir. They also found out that the 2014 EBOV outbreak might be caused by a single transmission from the natural reservoir, followed by human-to-human transmission during the outbreak. Their results also suggested that the epidemic episode in Sierra Leon might stem from the introduction of two genetically distinct viruses from Guinea around the same time (Gire, et al., 2014).

[0456] It has been also possible to determine how the Lassa virus spread out from its origin point, in particular thanks to human-to-human transmission and even retrace the history of this spread 400 years back (Andersen, et al., Cell 162(4):738-50, 2015).

[0457] In relation to the work needed during the 2013-2015 EBOV outbreak and the difficulties encountered by the medical staff at the site of the outbreak, and more generally, the method of the invention makes it possible to carry out sequencing using fewer selected probes such that sequencing can be accelerated, thus shortening the time needed from sample taking to results procurement. Further, kits and systems can be designed to be usable on the field so that diagnostics of a patient can be readily performed without need to send or ship samples to another part of the country or the world.

[0458] In any method described above, sequencing the target sequence or fragment thereof may be used any of the sequencing processes described above. Further, sequencing the target sequence or fragment thereof may be a near-real-time sequencing. Sequencing the target sequence or fragment thereof may be carried out according to previously described methods (Experimental Procedures: Matranga et al., 2014; and Gire, et al., 2014). Sequencing the target sequence or fragment thereof may comprise parallel sequencing of a plurality of target sequences. Sequencing the target sequence or fragment thereof may comprise Illumina sequencing.

[0459] Analyzing the target sequence or fragment thereof that hybridizes to one or more of the selected probes may be an identifying analysis, wherein hybridization of a selected probe to the target sequence or a fragment thereof indicates the presence of the target sequence within the sample.

[0460] Currently, primary diagnostics are based on the symptoms a patient has. However, various diseases may share identical symptoms so that diagnostics rely much on statistics. For example, malaria triggers flu-like symptoms: headache, fever, shivering, joint pain, vomiting, hemolytic anemia, jaundice, hemoglobin in the urine, retinal damage, and convulsions. These symptoms are also common for septicemia, gastroenteritis, and viral diseases. Amongst the latter, Ebola hemorrhagic fever has the following symptoms fever, sore throat, muscular pain, headaches, vomiting, diarrhea, rash, decreased function of the liver and kidneys, internal and external hemorrhage.

[0461] When a patient is presented to a medical unit, for example in tropical Africa, basic diagnostics will conclude to malaria because statistically, malaria is the most probable disease within that region of Africa. The patient is consequently treated for malaria although the patient might not actually have contracted the disease and the patient ends up not being correctly treated. This lack of correct treatment can be life-threatening especially when the disease the patient contracted presents a rapid evolution. It might be too late before the medical staff realizes that the treatment given to the patient is ineffective and comes to the correct diagnostics and administers the adequate treatment to the patient.

[0462] The method of the invention provides a solution to this situation. Indeed, because the number of guide RNAs can be dramatically reduced, this makes it possible to provide on a single chip selected probes divided into groups, each group being specific to one disease, such that a plurality of diseases, e.g. viral infection, can be diagnosed at the same time. Thanks to the invention, more than 3 diseases can be diagnosed on a single chip, preferably more than 4, 5, 6, 7, 8, 9, 10, 11, 12, 13, 14, 15, 16, 17, 18, 19, 20 diseases at the same time, preferably the diseases that most commonly occur within the population of a given geographical area. Since each group of selected probes is specific to one of the diagnosed diseases, a more accurate diagnosis can be performed, thus diminishing the risk of administering the wrong treatment to the patient.

[0463] In other cases, a disease such as a viral infection may occur without any symptoms, or had caused symptoms but they faded out before the patient is presented to the medical staff. In such cases, either the patient does not seek any medical assistance or the diagnostics is complicated due to the absence of symptoms on the day of the presentation.

[0464] The present invention may also be used in concert with other methods of diagnosing disease, identifying pathogens and optimizing treatment based upon detection of nucleic acids, such as mRNA in crude, non-purified samples.

[0465] The method of the invention also provides a powerful tool to address this situation. Indeed, since a plurality of groups of selected guide RNAs, each group being specific to one of the most common diseases that occur within the population of the given area, are comprised within a single diagnostic, the medical staff only need to contact a biological sample taken from the patient with the chip. Reading the chip reveals the diseases the patient has contracted.

[0466] In some cases, the patient is presented to the medical staff for diagnostics of particular symptoms. The method of the invention makes it possible not only to identify which disease causes these symptoms but at the same time determine whether the patient suffers from another disease he was not aware of.

[0467] This information might be of utmost importance when searching for the mechanisms of an outbreak. Indeed, groups of patients with identical viruses also show temporal patterns suggesting a subject-to-subject transmission links.

### Screening Microbial Genetic Perturbations

[0468] In certain example embodiments, the CRISPR systems disclosed herein may be used to screen microbial genetic perturbations. Such methods may be useful, for example to map out microbial pathways and functional networks. Microbial cells may be genetically modified and then screened under different experimental conditions. As described above, the embodiments disclosed herein can screen for multiple target molecules in a single sample, or a single target in a single individual discrete volume in a multiplex fashion. Genetically modified microbes may be modified to include a nucleic acid barcode sequence that identifies the particular genetic modification carried by a particular microbial cell or population of microbial cells. A barcode is s short sequence of nucleotides (for example, DNA, RNA, or combinations thereof) that is used as an identifier. A nucleic acid barcode may have a length of 4-100 nucleotides and be either single or double-stranded. Methods for identifying cells with barcodes are known in the art. Accordingly, guide RNAs of the CRISPR effector systems described herein may be used to detect the barcode. Detection of the positive detectable signal indicates the presence of a particular genetic modification in the sample. The methods disclosed herein may be combined with other methods for detecting complimentary genotype or phenotypic readouts indicating the effect of the genetic modification under the experimental conditions tested. Genetic modifications to be screened may include, but are not limited to a gene knock-in, a gene knock-out, inversions, translocations, transpositions, or one or more nucleotide insertions, deletions, substitutions, mutations, or addition of nucleic acids encoding an epitope with a functional consequence such as altering protein stability or detection. In a similar fashion, the methods described herein may be used in synthetic biology application to screen the functionality of specific arrangements of gene regulatory elements and gene expression modules.

[0469] In certain example embodiments, the methods may be used to screen hypomorphs. Generation of hypomorphs and their use in identifying key bacterial functional genes and identification of new antibiotic therapeutics as disclosed in PCT/US2016/060730 entitled “Multiplex High-Resolution Detection of Micro-organism Strains, Related Kits, Diagnostic Methods and Screening Assays” filed Nov. 4, 2016, which is incorporated herein by reference.

[0470] The different experimental conditions may comprise exposure of the microbial cells to different chemical agents, combinations of chemical agents, different concentrations of chemical agents or combinations of chemical agents, different durations of exposure to chemical agents or combinations of chemical agents, different physical parameters, or both. In certain example embodiments the chemical agent is an antibiotic or antiviral. Different physical parameters to be screened may include different temperatures, atmospheric pressures, different atmospheric and non-atmospheric gas concentrations, different pH levels, different culture media compositions, or a combination thereof.

### Screening Environmental Samples

[0471] The methods disclosed herein may also be used to screen environmental samples for contaminants by detecting the presence of target nucleic acid or polypeptides. For example, in some embodiments, the invention provides a method of detecting microbes, comprising: exposing a CRISPR system as described herein to a sample; activating an RNA effector protein via binding of one or more guide RNAs to one or more microbe-specific target RNAs or one or more trigger RNAs such that a detectable positive signal is produced. The positive signal can be detected and is indicative of the presence of one or more microbes in the sample. In some embodiments, the CRISPR system may be on a substrate as described herein, and the substrate may be exposed to the sample. In other embodiments, the same CRISPR system, and/or a different CRISPR system may be applied to multiple discrete locations on the substrate. In further embodiments, the different CRISPR system may detect a different microbe at each location. As described in further detail above, a substrate may be a flexible materials substrate, for example, including, but not limited to, a paper substrate, a fabric substrate, or a flexible polymer-based substrate.

[0472] In accordance with the invention, the substrate may be exposed to the sample passively, by temporarily immersing the substrate in a fluid to be sampled, by applying a fluid to be tested to the substrate, or by contacting a surface to be tested with the substrate. Any means of introducing the sample to the substrate may be used as appropriate.

[0473] As described herein, a sample for use with the invention may be a biological or environmental sample, such as a food sample (fresh fruits or vegetables, meats), a beverage sample, a paper surface, a fabric surface, a metal surface, a wood surface, a plastic surface, a soil sample, a freshwater sample, a wastewater sample, a saline water sample, exposure to atmospheric air or other gas sample, or a combination thereof. For example, household/commercial/industrial surfaces made of any materials including, but not limited to, metal, wood, plastic, rubber, or the like, may be swabbed and tested for contaminants. Soil samples may be tested for the presence of pathogenic bacteria or parasites, or other microbes, both for environmental purposes and/or for human, animal, or plant disease testing. Water samples such as freshwater samples, wastewater samples, or saline water samples can be evaluated for cleanliness and safety, and/or potability, to detect the presence of, for example, Cryptosporidium parvum, Giardia lamblia, or other microbial contamination. In further embodiments, a biological sample may be obtained from a source including, but not limited to, a tissue sample, saliva, blood, plasma, sera, stool, urine, sputum, mucous, lymph, synovial fluid, cerebrospinal fluid, ascites, pleural effusion, seroma, pus, or swab of skin or a mucosal membrane surface. In some particular embodiments, an environmental sample or biological samples may be crude samples and/or the one or more target molecules may not be purified or amplified from the sample prior to application of the method. Identification of microbes may be useful and/or needed for any number of applications, and thus any type of sample from any source deemed appropriate by one of skill in the art may be used in accordance with the invention.

[0474] In some embodiments, checking for food contamination by bacteria, such as E. coli, in restaurants or other food providers; food surfaces; Testing water for pathogens like Salmonella, Campylobacter, or E. coli; also checking food quality for manufacturers and regulators to determine the purity of meat sources; identifying air contamination with pathogens such as legionella; Checking whether beer is contaminated or spoiled by pathogens like Pediococcus and Lactobacillus; contamination of pasteurized or un-pasteurized cheese by bacteria or fungi during manufacture.

[0475] A microbe in accordance with the invention may be a pathogenic microbe or a microbe that results in food or consumable product spoilage. A pathogenic microbe may be pathogenic or otherwise undesirable to humans, animals, or plants. For human or animal purposes, a microbe may cause a disease or result in illness. Animal or veterinary applications of the present invention may identify animals infected with a microbe. For example, the methods and systems of the invention may identify companion animals with pathogens including, but not limited to, kennel cough, rabies virus, and heartworms. In other embodiments, the methods and systems of the invention may be used for parentage testing for breeding purposes. A plant microbe may result in harm or disease to a plant, reduction in yield, or alter traits such as color, taste, consistency, odor, for food or consumable contamination purposes, a microbe may adversely affect the taste, odor, color, consistency or other commercial properties of the food or consumable product. In certain example embodiments, the microbe is a bacterial species. The bacteria may be a psychotroph, a coliform, a lactic acid bacteria, or a spore-forming bacterium. In certain example embodiments, the bacteria may be any bacterial species that causes disease or illness, or otherwise results in an unwanted product or trait. Bacteria in accordance with the invention may be pathogenic to humans, animals, or plants.

[0476] Appropriate samples for use in the methods disclosed herein include any conventional biological sample obtained from an organism or a part thereof, such as a plant, animal, bacteria, and the like. In particular embodiments, the biological sample is obtained from an animal subject, such as a human subject. A biological sample is any solid or fluid sample obtained from, excreted by or secreted by any living organism, including, without limitation, single celled organisms, such as bacteria, yeast, protozoans, and amoebas among others, multicellular organisms (such as plants or animals, including samples from a healthy or apparently healthy human subject or a human patient affected by a condition or disease to be diagnosed or investigated, such as an infection with a pathogenic microorganism, such as a pathogenic bacteria or virus). For example, a biological sample can be a biological fluid obtained from, for example, blood, plasma, serum, urine, stool, sputum, mucous, lymph fluid, synovial fluid, bile, ascites, pleural effusion, seroma, saliva, cerebrospinal fluid, aqueous or vitreous humor, or any bodily secretion, a transudate, an exudate (for example, fluid obtained from an abscess or any other site of infection or inflammation), or fluid obtained from a joint (for example, a normal joint or a joint affected by disease, such as rheumatoid arthritis, osteoarthritis, gout or septic arthritis), or a swab of skin or mucosal membrane surface.

[0477] A sample can also be a sample obtained from any organ or tissue (including a biopsy or autopsy specimen, such as a tumor biopsy) or can include a cell (whether a primary cell or cultured cell) or medium conditioned by any cell, tissue or organ. Exemplary samples include, without limitation, cells, cell lysates, blood smears, cytocentrifuge preparations, cytology smears, bodily fluids (e.g., blood, plasma, serum, saliva, sputum, urine, bronchoalveolar lavage, semen, etc.), tissue biopsies (e.g., tumor biopsies), fine-needle aspirates, and/or tissue sections (e.g., cryostat tissue sections and/or paraffin-embedded tissue sections). In other examples, the sample includes circulating tumor cells (which can be identified by cell surface markers). In particular examples, samples are used directly (e.g., fresh or frozen), or can be manipulated prior to use, for example, by fixation (e.g., using formalin) and/or embedding in wax (such as formalin-fixed paraffin-embedded (FFPE) tissue samples). It will be appreciated that any method of obtaining tissue from a subject can be utilized, and that the selection of the method used will depend upon various factors such as the type of tissue, age of the subject, or procedures available to the practitioner. Standard techniques for acquisition of such samples are available in the art. See, for example Schluger et al., J. Exp. Med. 176:1327-33 (1992); Bigby et al., Am. Rev. Respir. Dis. 133:515-18 (1986); Kovacs et al., NEJM 318:589-93 (1988); and Ognibene et al., Am. Rev. Respir. Dis. 129:929-32 (1984).

[0478] In other embodiments, a sample may be an environmental sample, such as water, soil, or a surface such as industrial or medical surface. In some embodiments, methods such as disclosed in US patent publication No. 2013/0190196 may be applied for detection of nucleic acid signatures, specifically RNA levels, directly from crude cellular samples with a high degree of sensitivity and specificity. Sequences specific to each pathogen of interest may be identified or selected by comparing the coding sequences from the pathogen of interest to all coding sequences in other organisms by BLAST software.

[0479] Several embodiments of the present disclosure involve the use of procedures and approaches known in the art to successfully fractionate clinical blood samples. See, e.g. the procedure described in Han Wei Hour et al., Microfluidic Devices for Blood Fractionation, Micromachines 2011, 2, 319-343; Ali Asgar S. Bhagat et al., Dean Flow Fractionation (DFF) Isolation of Circulating Tumor Cells (CTCs) from Blood, 15th International Conference on Miniaturized Systems for Chemistry and Life Sciences, Oct. 2-6, 2011, Seattle, Wash.; and International Patent Publication No. WO2011109762, the disclosures of which are herein incorporated by reference in their entirety. Blood samples are commonly expanded in culture to increase sample size for testing purposes. In some embodiments of the present invention, blood or other biological samples may be used in methods as described herein without the need for expansion in culture.

[0480] Further, several embodiments of the present disclosure involve the use of procedures and approaches known in the art to successfully isolate pathogens from whole blood using spiral microchannel, as described in Han Wei Hour et al., Pathogen Isolation from Whole Blood Using Spiral Microchannel, Case No. 15995JR, Massachusetts Institute of Technology, manuscript in preparation, the disclosure of which is herein incorporated by reference in its entirety.

[0481] Owing to the increased sensitivity of the embodiments disclosed herein, in certain example embodiments, the assays and methods may be run on crude samples or samples where the target molecules to be detected are not further fractionated or purified from the sample.

### Example Microbes

[0482] The embodiment disclosed herein may be used to detect a number of different microbes. The term microbe as used herein includes bacteria, fungus, protozoa, parasites and viruses.

[0483] Bacteria

[0484] The following provides an example list of the types of microbes that might be detected using the embodiments disclosed herein. In certain example embodiments, the microbe is a bacterium. Examples of bacteria that can be detected in accordance with the disclosed methods include without limitation any one or more of (or any combination of) Acinetobacter baumanii, Actinobacillus sp., Actinomycetes, Actinomyces sp. (such as Actinomyces israelii and Actinomyces naeslundii), Aeromonas sp. (such as Aeromonas hydrophila, Aeromonas veronii biovar sobria (Aeromonas sobria), and Aeromonas caviae), Anaplasma phagocytophilum, Anaplasma marginale Alcaligenes xylosoxidans, Acinetobacter baumanii, Actinobacillus actinomycetemcomitans, Bacillus sp. (such as Bacillus anthracia, Bacillus cereus, Bacillus subtilis, Bacillus thuringiensis, and Bacillus stearothermophilus), Bacteroides sp. (such as Bacteroides fragilis), Bartonella sp. (such as Bartonella bacilliformis and Bartonella henselae, Bifidobacterium sp., Bordetella sp. (such as Bordetella pertussis, Bordetella parapertussis, and Bordetella bronchiseptica), Borrelia sp. (such as Borrelia recurrentis, and Borrelia burgdorferi), Brucella sp. (such as Brucella abortus, Brucella canis, Brucella melintensis and Brucella suis), Burkholderia sp. (such as Burkholderia pseudomallei and Burkholderia cepacia), Campylobacter sp. (such as Campylobacter jejuni, Campylobacter coli, Campylobacter lari and Campylobacter fetus), Capnocytophaga sp., Cardiobacterium hominis, Chlamydia trachomatis, Chlamydophila pneumoniae, Chlamydophila psittaci, Citrobacter sp. Coxiella burnetii, Corynebacterium sp. (such as, Corynebacterium diphtheriae, Corynebacterium jeikeum and Corynebacterium), Clostridium sp. (such as Clostridium perfringens, Clostridium difficile, Clostridium botulinum and Clostridium tetani), Eikenella corrodens, Enterobacter sp. (such as Enterobacter aerogenes, Enterobacter agglomerans, Enterobacter cloacae and Escherichia coli, including opportunistic Escherichia coli, such as enterotoxigenic E. coli, enteroinvasive E. coli, enteropathogenic E. coli, enterohemorrhagic E. coli, enteroaggregative E. coli and uropathogenic E. coli) Enterococcus sp. (such as Enterococcus faecalis and Enterococcus faecium) Ehrlichia sp. (such as Ehrlichia chafeensia and Ehrlichia canis), Epidermophyton floccosum, Erysipelothrix rhusiopathiae, Eubacterium sp., Francisella tularensis, Fusobacterium nucleatum, Gardnerella vaginalis, Gemella morbillorum, Haemophilus sp. (such as Haemophilus influenzae, Haemophilus ducreyi, Haemophilus aegyptius, Haemophilus parainfluenzae, Haemophilus haemolyticus and Haemophilus parahaemolyticus, Helicobacter sp. (such as Helicobacter pylori, Helicobacter cinaedi and Helicobacter fennelliae), Kingella kingii, Klebsiella sp. (such as Klebsiella pneumoniae, Klebsiella granulomatis and Klebsiella oxytoca), Lactobacillus sp., Listeria monocytogenes, Leptospira interrogans, Legionella pneumophila, Leptospira interrogans, Peptostreptococcus sp., Mannheimia hemolytica, Microsporum canis, Moraxella catarrhalis, Morganella sp., Mobiluncus sp., Micrococcus sp., Mycobacterium sp. (such as Mycobacterium leprae, Mycobacterium tuberculosis, Mycobacterium paratuberculosis, Mycobacterium intracellulare, Mycobacterium avium, Mycobacterium bovis, and Mycobacterium marinum), Mycoplasm sp. (such as Mycoplasma pneumoniae, Mycoplasma hominis, and Mycoplasma genitalium), Nocardia sp. (such as Nocardia asteroides, Nocardia cyriacigeorgica and Nocardia brasiliensis), Neisseria sp. (such as Neisseria gonorrhoeae and Neisseria meningitidis), Pasteurella multocida, Pityrosporum orbiculare (Malassezia furfur), Plesiomonas shigelloides. Prevotella sp., Porphyromonas sp., Prevotella melaninogenica, Proteus sp. (such as Proteus vulgaris and Proteus mirabilis), Providencia sp. (such as Providencia alcalifaciens, Providencia rettgeri and Providencia stuartii), Pseudomonas aeruginosa, Propionibacterium acnes, Rhodococcus equi, Rickettsia sp. (such as Rickettsia rickettsii, Rickettsia akari and Rickettsia prowazekii, Orientia tsutsugamushi (formerly: Rickettsia tsutsugamushi) and Rickettsia typhi), Rhodococcus sp., Serratia marcescens, Stenotrophomonas maltophilia, Salmonella sp. (such as Salmonella enterica, Salmonella typhi, Salmonella paratyphi, Salmonella enteritidis, Salmonella cholerasuis and Salmonella typhimurium), Serratia sp. (such as Serratia marcesans and Serratia liquifaciens), Shigella sp. (such as Shigella dysenteriae, Shigella flexneri, Shigella boydii and Shigella sonnei), Staphylococcus sp. (such as Staphylococcus aureus, Staphylococcus epidermidis, Staphylococcus hemolyticus, Staphylococcus saprophyticus), Streptococcus sp. (such as Streptococcus pneumoniae (for example chloramphenicol-resistant serotype 4 Streptococcus pneumoniae, spectinomycin-resistant serotype 6B Streptococcus pneumoniae, streptomycin-resistant serotype 9V Streptococcus pneumoniae, erythromycin-resistant serotype 14 Streptococcus pneumoniae, optochin-resistant serotype 14 Streptococcus pneumoniae, rifampicin-resistant serotype 18C Streptococcus pneumoniae, tetracycline-resistant serotype 19F Streptococcus pneumoniae, penicillin-resistant serotype 19F Streptococcus pneumoniae, and trimethoprim-resistant serotype 23F Streptococcus pneumoniae, chloramphenicol-resistant serotype 4 Streptococcus pneumoniae, spectinomycin-resistant serotype 6B Streptococcus pneumoniae, streptomycin-resistant serotype 9V Streptococcus pneumoniae, optochin-resistant serotype 14 Streptococcus pneumoniae, rifampicin-resistant serotype 18C Streptococcus pneumoniae, penicillin-resistant serotype 19F Streptococcus pneumoniae, or trimethoprim-resistant serotype 23F Streptococcus pneumoniae), Streptococcus agalactiae, Streptococcus mutans, Streptococcus pyogenes, Group A streptococci, Streptococcus pyogenes, Group B streptococci, Streptococcus agalactiae, Group C streptococci, Streptococcus anginosus, Streptococcus equismilis, Group D streptococci, Streptococcus bovis, Group F streptococci, and Streptococcus anginosus Group G streptococci), Spirillum minus, Streptobacillus moniliformi, Treponema sp. (such as Treponema carateum, Treponema petenue, Treponema pallidum and Treponema endemicum, Trichophyton rubrum, T. mentagrophytes, Tropheryma whippelii, Ureaplasma urealyticum, Veillonella sp., Vibrio sp. (such as Vibrio cholerae, Vibrio parahemolyticus, Vibrio vulnificus, Vibrio parahaemolyticus, Vibrio vulnificus, Vibrio alginolyticus, Vibrio mimicus, Vibrio hollisae, Vibrio fluvialis, Vibrio metchnikovii, Vibrio damsela and Vibrio furnisii), Yersinia sp. (such as Yersinia enterocolitica, Yersinia pestis, and Yersinia pseudotuberculosis) and Xanthomonas maltophilia among others.

[0485] Fungi

[0486] In certain example embodiments, the microbe is a fungus or a fungal species. Examples of fungi that can be detected in accordance with the disclosed methods include without limitation any one or more of (or any combination of), Aspergillus, Blastomyces, Candidiasis, Coccidiodomycosis, Cryptococcus neoformans, Cryptococcus gatti, sp. Histoplasma sp. (such as Histoplasma capsulatum), Pneumocystis sp. (such as Pneumocystis jirovecii), Stachybotrys (such as Stachybotrys chartarum), Mucroymcosis, Sporothrix, fungal eye infections ringworm, Exserohilum, Cladosporium.

[0487] In certain example embodiments, the fungus is a yeast. Examples of yeast that can be detected in accordance with disclosed methods include without limitation one or more of (or any combination of), Aspergillus species (such as Aspergillus fumigatus, Aspergillus flavus and Aspergillus clavatus), Cryptococcus sp. (such as Cryptococcus neoformans, Cryptococcus gattii, Cryptococcus laurentii and Cryptococcus albidus), a Geotrichum species, a Saccharomyces species, a Hansenula species, a Candida species (such as Candida albicans), a Kluyveromyces species, a Debaryomyces species, a Pichia species, or combination thereof. In certain example embodiments, the fungi is a mold. Example molds include, but are not limited to, a Penicillium species, a Cladosporium species, a Byssochlamys species, or a combination thereof.

[0488] Protozoa

[0489] In certain example embodiments, the microbe is a protozoa. Examples of protozoa that can be detected in accordance with the disclosed methods and devices include without limitation any one or more of (or any combination of), Euglenozoa, Heterolobosea, Diplomonadida, Amoebozoa, Blastocystic, and Apicomplexa. Example Euglenoza include, but are not limited to, Trypanosoma cruzi (Chagas disease), T. brucei gambiense, T. brucei rhodesiense, Leishmania braziliensis, L. infantum, L. mexicana, L. major, L. tropica, and L. donovani. Example Heterolobosea include, but are not limited to, Naegleria fowleri. Example Diplomonadids include, but are not limited to, Giardia intestinalis (G. lamblia, G. duodenalis). Example Amoebozoa include, but are not limited to, Acanthamoeba castellanii, Balamuthia madrillaris, Entamoeba histolytica. Example Blastocysts include, but are not limited to, Blastocystic hominis. Example Apicomplexa include, but are not limited to, Babesia microti, Cryptosporidium parvum, Cyclospora cayetanensis, Plasmodium falciparum, P. vivax, P. ovale, P. malariae, and Toxoplasma gondii.

[0490] Parasites

[0491] In certain example embodiments, the microbe is a parasite. Examples of parasites that can be detected in accordance with disclosed methods include without limitation one or more of (or any combination of), Trypanosoma cruzi (Chagas disease), T. brucei gambiense, T. brucei rhodesiense, Leishmania braziliensis, L. infantum, L. mexicana, L. major, L. tropica, L. donovani, Naegleria fowleri, Giardia intestinalis (G. lamblia, G. duodenalis), canthamoeba castellanii, Balamuthia madrillaris, Entamoeba histolytica, Blastocystic hominis, Babesia microti, Cryptosporidium parvum, Cyclospora cayetanensis, Plasmodium falciparum, P. vivax, P. ovale, P. malariae, and Toxoplasma gondii, or combination thereof.

[0492] In specific embodiments, example parasites include members of the species Onchocerca and Plasmodium.

[0493] Viruses

[0494] In certain example embodiments, the systems, devices, and methods, disclosed herein are directed to detecting viruses in a sample. The embodiments disclosed herein may be used to detect viral infection (e.g. of a subject or plant), or determination of a viral strain, including viral strains that differ by a single nucleotide polymorphism. The virus may be a DNA virus, a RNA virus, or a retrovirus. Non-limiting example of viruses useful with the present invention include, but are not limited to Ebola, measles, SARS, Chikungunya, hepatitis, Marburg, yellow fever, MERS, Dengue, Lassa, influenza, rhabdovirus or HIV. A hepatitis virus may include hepatitis A, hepatitis B, or hepatitis C. An influenza virus may include, for example, influenza A or influenza B. An HIV may include HIV 1 or HIV 2. In certain example embodiments, the viral sequence may be a human respiratory syncytial virus, Sudan ebola virus, Bundibugyo virus, Tai Forest ebola virus, Reston ebola virus, Achimota, Aedes flavivirus, Aguacate virus, Akabane virus, Alethinophid reptarenavirus, Allpahuayo mammarenavirus, Amapari mmarenavirus, Andes virus, Apoi virus, Aravan virus, Aroa virus, Arumwot virus, Atlantic salmon paramyxovirus, Australian bat lyssavirus, Avian bornavirus, Avian metapneumovirus, Avian paramyxoviruses, penguin or Falkland Islandsvirus, BK polyomavirus, Bagaza virus, Banna virus, Bat herpesvirus, Bat sapovirus, Bear Canon mammarenavirus, Beilong virus, Betacoronavirus, Betapapillomavirus 1-6, Bhanja virus, Bokeloh bat lyssavirus, Borna disease virus, Bourbon virus, Bovine hepacivirus, Bovine parainfluenza virus 3, Bovine respiratory syncytial virus, Brazoran virus, Bunyamwera virus, Caliciviridae virus. California encephalitis virus, Candiru virus, Canine distemper virus, Canine pneumovirus, Cedar virus, Cell fusing agent virus, Cetacean morbillivirus, Chandipura virus, Chaoyang virus, Chapare mammarenavirus, Chikungunya virus, Colobus monkey papillomavirus, Colorado tick fever virus, Cowpox virus, Crimean-Congo hemorrhagic fever virus, Culex flavivirus, Cupixi mammarenavirus, Dengue virus, Dobrava-Belgrade virus, Donggang virus, Dugbe virus, Duvenhage virus, Eastern equine encephalitis virus, Entebbe bat virus, Enterovirus A-D, European bat lyssavirus 1-2, Eyach virus, Feline morbillivirus, Fer-de-Lance paramyxovirus, Fitzroy River virus, Flaviviridae virus, Flexal mammarenavirus, GB virus C, Gairo virus, Gemycircularvirus, Goose paramyxovirus SF02, Great Island virus, Guanarito mammarenavirus, Hantaan virus, Hantavirus Z10, Heartland virus, Hendra virus, Hepatitis A/B/C/E, Hepatitis delta virus, Human bocavirus, Human coronavirus, Human endogenous retrovirus K, Human enteric coronavirus, Human genital-associated circular DNA virus-1, Human herpesvirus 1-8, Human immunodeficiency virus 1/2, Human mastadenovirus A-G, Human papillomavirus, Human parainfluenza virus 1-4, Human paraechovirus, Human picornavirus, Human smacovirus, Ikoma lyssavirus, Ilheus virus, Influenza A-C, Ippy mammarenavirus, Irkut virus, J-virus, JC polyomavirus, Japanese encephalitis virus, Junin mammarenavirus, KI polyomavirus, Kadipiro virus, Kamiti River virus, Kedougou virus, Khuj and virus, Kokobera virus, Kyasanur forest disease virus, Lagos bat virus, Langat virus, Lassa mammarenavirus, Latino mammarenavirus, Leopards Hill virus, Liao ning virus, Ljungan virus, Lloviu virus, Louping ill virus, Lujo mammarenavirus, Luna mammarenavirus, Lunk virus, Lymphocytic choriomeningitis mammarenavirus, Lyssavirus Ozernoe, MSSI2\0.225 virus, Machupo mammarenavirus, Mamastrovirus 1, Manzanilla virus, Mapuera virus, Marburg virus, Mayaro virus, Measles virus, Menangle virus, Mercadeo virus, Merkel cell polyomavirus, Middle East respiratory syndrome coronavirus, Mobala mammarenavirus, Modoc virus, Moijang virus, Mokolo virus, Monkeypox virus, Montana myotis leukoenchalitis virus, Mopeia lassa virus reassortant 29, Mopeia mammarenavirus, Morogoro virus, Mossman virus, Mumps virus, Murine pneumonia virus, Murray Valley encephalitis virus, Nariva virus, Newcastle disease virus, Nipah virus, Norwalk virus, Norway rat hepacivirus, Ntaya virus, O'nyong-nyong virus, Oliveros mammarenavirus, Omsk hemorrhagic fever virus, Oropouche virus, Parainfluenza virus 5, Parana mammarenavirus, Parramatta River virus, Peste-des-petits-ruminants virus, Pichande mammarenavirus, Picornaviridae virus, Pirital mammarenavirus, Piscihepevirus A, Porcine parainfluenza virus 1, porcine rubulavirus, Powassan virus, Primate T-lymphotropic virus 1-2, Primate erythroparvovirus 1, Punta Toro virus, Puumala virus, Quang Binh virus, Rabies virus, Razdan virus, Reptile bornavirus 1, Rhinovirus A-B, Rift Valley fever virus, Rinderpest virus, Rio Bravo virus, Rodent Torque Teno virus, Rodent hepacivirus, Ross River virus, Rotavirus A-I, Royal Farm virus, Rubella virus, Sabia mammarenavirus, Salem virus, Sandfly fever Naples virus, Sandfly fever Sicilian virus, Sapporo virus, Sathuperi virus, Seal anellovirus, Semliki Forest virus, Sendai virus, Seoul virus, Sepik virus, Severe acute respiratory syndrome-related coronavirus, Severe fever with thrombocytopenia syndrome virus, Shamonda virus, Shimoni bat virus, Shuni virus, Simbu virus, Simian torque teno virus, Simian virus 40-41, Sin Nombre virus, Sindbis virus, Small anellovirus, Sosuga virus, Spanish goat encephalitis virus, Spondweni virus, St. Louis encephalitis virus, Sunshine virus, TTV-like mini virus, Tacaribe mammarenavirus, Taila virus, Tamana bat virus, Tamiami mammarenavirus, Tembusu virus, Thogoto virus, Thottapalayam virus, Tick-borne encephalitis virus, Tioman virus, Togaviridae virus, Torque teno canis virus, Torque teno douroucouli virus, Torque teno felis virus, Torque teno midi virus, Torque teno sus virus, Torque teno tamarin virus, Torque teno virus, Torque teno zalophus virus, Tuhoko virus, Tula virus, Tupaia paramyxovirus, Usutu virus, Uukuniemi virus, Vaccinia virus, Variola virus, Venezuelan equine encephalitis virus, Vesicular stomatitis Indiana virus, WU Polyomavirus, Wesselsbron virus, West Caucasian bat virus, West Nile virus, Western equine encephalitis virus, Whitewater Arroyo mammarenavirus, Yellow fever virus, Yokose virus, Yug Bogdanovac virus, Zaire ebolavirus, Zika virus, or Zygosaccharomyces bailii virus Z viral sequence. Examples of RNA viruses that may be detected include one or more of (or any combination of) Coronaviridae virus, a Picornaviridae virus, a Caliciviridae virus, a Flaviviridae virus, a Togaviridae virus, a Bornaviridae, a Filoviridae, a Paramyxoviridae, a Pneumoviridae, a Rhabdoviridae, an Arenaviridae, a Bunyaviridae, an Orthomyxoviridae, or a Deltavirus. In certain example embodiments, the virus is Coronavirus, SARS, Poliovirus, Rhinovirus, Hepatitis A, Norwalk virus, Yellow fever virus, West Nile virus, Hepatitis C virus, Dengue fever virus, Zika virus, Rubella virus, Ross River virus, Sindbis virus, Chikungunya virus, Borna disease virus, Ebola virus, Marburg virus, Measles virus, Mumps virus, Nipah virus, Hendra virus, Newcastle disease virus, Human respiratory syncytial virus, Rabies virus, Lassa virus, Hantavirus, Crimean-Congo hemorrhagic fever virus, Influenza, or Hepatitis D virus.

[0495] In certain example embodiments, the virus may be a plant virus selected from the group comprising Tobacco mosaic virus (TMV), Tomato spotted wilt virus (TSWV), Cucumber mosaic virus (CMV), Potato virus Y (PVY), the RT virus Cauliflower mosaic virus (CaMV), Plum pox virus (PPV), Brome mosaic virus (BMV), Potato virus X (PVX), Citrus tristeza virus (CTV), Barley yellow dwarf virus (BYDV), Potato leafroll virus (PLRV), Tomato bushy stunt virus (TBSV), rice tungro spherical virus (RTSV), rice yellow mottle virus (RYMV), rice hoja blanca virus (RHBV), maize rayado fino virus (MRFV), maize dwarf mosaic virus (MDMV), sugarcane mosaic virus (SCMV), Sweet potato feathery mottle virus (SPFMV), sweet potato sunken vein closterovirus (SPSVV), Grapevine fanleaf virus (GFLV), Grapevine virus A (GVA), Grapevine virus B (GVB), Grapevine fleck virus (GFkV), Grapevine leafroll-associated virus-1, -2, and -3, (GLRaV-1, -2, and -3), Arabis mosaic virus (ArMV), or Rupestris stem pitting-associated virus (RSPaV). In a preferred embodiment, the target RNA molecule is part of said pathogen or transcribed from a DNA molecule of said pathogen. For example, the target sequence may be comprised in the genome of an RNA virus. It is further preferred that CRISPR effector protein hydrolyzes said target RNA molecule of said pathogen in said plant if said pathogen infects or has infected said plant. It is thus preferred that the CRISPR system is capable of cleaving the target RNA molecule from the plant pathogen both when the CRISPR system (or parts needed for its completion) is applied therapeutically, i.e. after infection has occurred or prophylactically, i.e. before infection has occurred.

[0496] In certain example embodiments, the virus may be a retrovirus. Example retroviruses that may be detected using the embodiments disclosed herein include one or more of or any combination of viruses of the Genus Alpharetrovirus, Betaretrovirus, Gammaretrovirus, Deltaretrovirus, Epsilonretrovirus, Lentivirus, Spumavirus, or the Family Metaviridae, Pseudoviridae, and Retroviridae (including HIV), Hepadnaviridae (including Hepatitis B virus), and Caulimoviridae (including Cauliflower mosaic virus).

[0497] In certain example embodiments, the virus is a DNA virus. Example DNA viruses that may be detected using the embodiments disclosed herein include one or more of (or any combination of) viruses from the Family Myoviridae, Podoviridae, Siphoviridae, Alloherpesviridae, Herpesviridae (including human herpes virus, and Varicella Zorter virus), Malocoherpesviridae, Lipothrixviridae, Rudiviridae, Adenoviridae, Ampullaviridae, Ascoviridae, Asfarviridae (including African swine fever virus), Baculoviridae, Cicaudaviridae, Clavaviridae, Corticoviridae, Fuselloviridae, Globuloviridae, Guttaviridae, Hytrosaviridae, Iridoviridae, Maseilleviridae, Mimiviridae, Nudiviridae, Nimaviridae, Pandoraviridae, Papillomaviridae, Phycodnaviridae, Plasmaviridae, Polydnaviruses, Polyomaviridae (including Simian virus 40, JC virus, BK virus), Poxviridae (including Cowpox and smallpox), Sphaerolipoviridae, Tectiviridae, Turriviridae, Dinodnavirus, Salterprovirus, Rhizidovirus, among others. In some embodiments, a method of diagnosing a species-specific bacterial infection in a subject suspected of having a bacterial infection is described as obtaining a sample comprising bacterial ribosomal ribonucleic acid from the subject; contacting the sample with one or more of the probes described, and detecting hybridization between the bacterial ribosomal ribonucleic acid sequence present in the sample and the probe, wherein the detection of hybridization indicates that the subject is infected with Escherichia coli, Klebsiella pneumoniae, Pseudomonas aeruginosa, Staphylococcus aureus, Acinetobacter baumannii, Candida albicans, Enterobacter cloacae, Enterococcus faecalis, Enterococcus faecium, Proteus mirabilis, Staphylococcus agalactiae, or Staphylococcus maltophilia or a combination thereof.

### Malaria Detection and Monitoring

[0498] Malaria is a mosquito-borne pathology caused by Plasmodium parasites. The parasites are spread to people through the bites of infected female Anopheles mosquitoes. Five Plasmodium species cause malaria in humans: Plasmodium falciparum, Plasmodium vivax, Plasmodium ovale, Plasmodium malariae, and Plasmodium knowlesi. Among them, according to the World Health Organization (WHO), Plasmodium falciparum and Plasmodium vivax are responsible for the greatest threat. P. falciparum is the most prevalent malaria parasite on the African continent and is responsible for most malaria-related deaths globally. P. vivax is the dominant malaria parasite in most countries outside of sub-Saharan Africa.

[0499] In 2015, 91 countries and areas had ongoing malaria transmission. According to the latest WHO estimates, there were 212 million cases of malaria in 2015 and 429 000 deaths. In areas with high transmission of malaria, children under 5 are particularly susceptible to infection, illness and death; more than two thirds (70%) of all malaria deaths occur in this age group. Between 2010 and 2015, the under-5 malaria death rate fell by 29% globally. However malaria remains a major killer of children under five years old, taking the life of a child every two minutes.

[0500] As described by the WHO, malaria is an acute febrile illness. In a non-immune individual, symptoms appear 7 days or more after the infective mosquito bite. The first symptoms—fever, headache, chills and vomiting—may be mild and difficult to recognize as malaria, however, if not treated within 24 hours, P. falciparum malaria can progress to severe illness, often leading to death.

[0501] Children with severe malaria frequently develop one or more of the following symptoms: severe anemia, respiratory distress in relation to metabolic acidosis, or cerebral malaria. In adults, multi-organ involvement is also frequent. In malaria endemic areas, people may develop partial immunity, allowing asymptomatic infections to occur.

[0502] The development of rapid and efficient diagnostic tests is of high relevance for public health. Indeed, early diagnosis and treatment of malaria not only reduces disease and prevents deaths but also contributes to reducing malaria transmission. According to the WHO recommendations, all cases of suspected malaria should be confirmed using parasite-based diagnostic testing (notably using a rapid diagnostic test) before administering treatment (see “WHO Guidelines for the treatment of malaria”, third edition, published in April 2015).

[0503] Resistance to antimalarial therapies represents a critical health problem which drastically reduces therapeutic strategies. Indeed, as reported on the WHO website, resistance of P. falciparum to previous generations of medicines, such as chloroquine and sulfadoxine/pyrimethamine (SP), became widespread in the 1950s and 1960s, undermining malaria control efforts and reversing gains in child survival. Thus, the WHO recommends the routine monitoring of antimalarial drug resistance. Indeed, accurate diagnostic may avoid non appropriate treatments and limit extension of resistance to antimalarial medicines.

[0504] In this context the WHO Global Technical Strategy for Malaria 2016-2030—adopted by the World Health Assembly in May 2015—provides a technical framework for all malaria-endemic countries. It is intended to guide and support regional and country programs as they work towards malaria control and elimination. The Strategy sets ambitious but achievable global targets, including:
[0505] Reducing malaria case incidence by at least 90% by 2030.
[0506] Reducing malaria mortality rates by at least 90% by 2030.
[0507] Eliminating malaria in at least 35 countries by 2030.
[0508] Preventing a resurgence of malaria in all countries that are malaria-free.

[0509] This Strategy was the result of an extensive consultative process that spanned 2 years and involved the participation of more than 400 technical experts from 70 Member States. It is based on 3 key axes:
[0510] ensuring universal access to malaria prevention, diagnosis and treatment;
[0511] accelerating efforts towards elimination and attainment of malaria-free status; and
[0512] transforming malaria surveillance into a core intervention.

[0513] Treatment against Plasmodium include aryl-amino alcohols such as quinine or quinine derivatives such as chloroquine, amodiaquine, mefloquine, piperaquine, lumefantrine, primaquine; lipophilic hydroxynaphthoquinone analog, such as atovaquone; antifolate drugs, such as the sulfa drugs sulfadoxine, dapsone and pyrimethamine; proguanil; the combination of atovaquone/proguanil; atemisins drugs; and combinations thereof.

[0514] Target sequences that are diagnostic for the presence of a mosquito-borne pathogen include sequence that diagnostic for the presence of Plasmodium, notably Plasmodia species affecting humans such as Plasmodium falciparum, Plasmodium vivax, Plasmodium ovale, Plasmodium malariae, and Plasmodium knowlesi, including sequences from the genomes thereof.

[0515] Target sequences that are diagnostic for monitoring drug resistance to treatment against Plasmodium, notably Plasmodia species affecting humans such as Plasmodium falciparum, Plasmodium vivax, Plasmodium ovale, Plasmodium malariae, and Plasmodium knowlesi.

[0516] Further target sequences include sequences include target molecules/nucleic acid molecules coding for proteins involved in essential biological process for the Plasmodium parasite and notably transporter proteins, such as protein from drug/metabolite transporter family, the ATP-binding cassette (ABC) protein involved in substrate translocation, such as the ABC transporter C subfamily or the Na+/H+exchanger, membrane glutathione S-transferase; proteins involved in the folate pathway, such as the dihydropteroate synthase, the dihydrofolate reductase activity or the dihydrofolate reductase-thymidylate synthase; and proteins involved in the translocation of protons across the inner mitochondrial membrane and notably the cytochrome b complex. Additional target may also include the gene(s) coding for the heme polymerase.

[0517] Further target sequences include target molecules/nucleic acid molecules coding for proteins involved in essential biological process may be selected from the P. falciparum chloroquine resistance transporter gene (pfcrt), the P. falciparum multidrug resistance transporter 1 (pfmdr1), the P. falciparum multidrug resistance-associated protein gene (Pfmrp), the P. falciparum Na+/H+exchanger gene (pfnhe), the gene coding for the P. falciparum exported protein 1, the P. falciparum Ca2+ transporting ATPase 6 (pfatp6); the P. falciparum dihydropteroate synthase (pfdhps), dihydrofolate reductase activity (pfdhpr) and dihydrofolate reductase-thymidylate synthase (pfdhfr) genes, the cytochrome b gene, gtp cyclohydrolase and the Kelch13 (K13) gene as well as their functional heterologous genes in other Plasmodium species.

[0518] A number of mutations, notably single point mutations, have been identified in the proteins which are the targets of the current treatments and associated with specific resistance phenotypes. Accordingly, the invention allows for the detection of various resistance phenotypes of mosquito-borne parasites, such as plasmodium.

[0519] The invention allows to detect one or more mutation(s) and notably one or more single nucleotide polymorphisms in target nucleic acids/molecules. Accordingly any one of the mutations below, or their combination thereof, can be used as drug resistance marker and can be detected according to the invention.

[0520] Single point mutations in P. falciparum K13 include the following single point mutations in positions 252, 441, 446, 449, 458, 493, 539, 543, 553, 561, 568, 574, 578, 580, 675, 476, 469, 481, 522, 537, 538, 579, 584 and 719 and notably mutations E252Q, P441L, F446I, G449A, N458Y, Y493H, R539T, I543T, P553L, R561H, V568G, P574L, A578S, C580Y, A675V, M4761; C469Y; A481V; S522C; N5371; N537D; G538V; M5791; D584V; and H719N. These mutations are generally associated with artemisins drugs resistance phenotypes (Artemisinin and artemisinin-based combination therapy resistance, April 2016 WHO/HTM/GMP/2016.5).

[0521] In the P. falciparum dihydrofolate reductase (DHFR) (PfDHFR-TS, PFD0830w), important polymorphisms include mutations in positions 108, 51, 59 and 164, notably 108 D, 164L, 51I and 59R which modulate resistance to pyrimethamine. Other polymorphisms also include 437G, 581G, 540E, 436A and 613S which are associated with resistance to sulfadoxine. Additional observed mutations include Ser108Asn, Asn51 Ile, Cys59Arg, Ile164Leu, Cys50Arg, Ile164Leu, Asn188Lys, Ser189Arg and Val213Ala, Ser108Thr and Ala16Val. Mutations Ser108Asn, Asn51 Ile, Cys59Arg, Ile164Leu, Cys50Arg, Ile164Leu are notably associated with pyrimethamine based therapy and/or chloroguanine-dapsone combination therapy resistances. Cycloguanil resistance appears to be associated with the double mutations Ser108Thr and Ala16Val. Amplification of dhfr may also be of high relevance for therapy resistance notably pyrimethamine resistance

[0522] In the P. falciparum dihydropteroate synthase (DHPS) (PfDHPS, PF08_0095), important polymorphisms include mutations in positions 436, 437, 581 and 613 Ser436Ala/Phe, Ala437Gly, Lys540Glu, Ala581Gly and Ala613Thr/Ser. Polymorphism in position 581 and/or 613 have also been associated with resistance to sulfadoxine-pyrimethamine base therapies.

[0523] In the P. falciparum chloroquine-resistance transporter (PfCRT), polymorphism in position 76, notably the mutation Lys76Thr, is associated with resistance to chloroquine. Further polymorphisms include Cys72Ser, Met74Ile, Asn75Glu, Ala220Ser, Gln271Glu, Asn326Ser, Ile356Thr and Arg371Ile which may be associated with chloroquine resistance. PfCRT is also phosphorylated at the residues S33, 5411 and T416, which may regulate the transport activity or specificity of the protein.

[0524] In the P. falciparum multidrug-resistance transporter 1 (PfMDR1) (PFE1150w), polymorphisms in positions 86, 184, 1034, 1042, notably Asn86Tyr, Tyr184-Phe, Ser1034Cys, Asn1042Asp and Asp1246Tyr have been identified and reported to influence have been reported to influence susceptibilities to lumefantrine, artemisinin, quinine, mefloquine, halofantrine and chloroquine. Additionally, amplification of PfMDR1 is associated with reduced susceptibility to lumefantrine, artemisinin, quinine, mefloquine, and halofantrine and deamplification of PfMDR1 leads to an increase in chloroquine resistance. Amplification of pfmdr1 may also be detected. The phosphorylation status of PfMDR1 is also of high relevance.

[0525] In the P. falciparum multidrug-resistance associated protein (PfMRP) (gene reference PFA0590w), polymorphisms in positions 191 and/or 437, such as Y191H and A437S have been identified and associated with chloroquine resistance phenotypes.

[0526] In the P. falciparum NA+/H+enchanger (PfNHE) (ref PF13 0019), increased repetition of the DNNND in microsatellite ms4670 may be a marker for quinine resistance.

[0527] Mutations altering the ubiquinol binding site of the cytochrome b protein encoded by the cytochrome be gene (cytb, mal_mito_3) are associated with atovaquone resistance. Mutations in positions 26, 268, 276, 133 and 280 and notably Tyr26Asn, Tyr268Ser, M1331 and G280D may be associated with atovaquone resistance.

[0528] For example in P Vivax, mutations in PvMDR1, the homolog of Pf MDR1 have been associated with chloroquine resistance, notably polymorphism in position 976 such as the mutation Y976F.

[0529] The above mutations are defined in terms of protein sequences. However, the skilled person is able to determine the corresponding mutations, including SNPS, to be identified as a nucleic acid target sequence.

[0530] Other identified drug-resistance markers are known in the art, for example as described in “Susceptibility of Plasmodium falciparum to antimalarial drugs (1996-2004)”; WHO; Artemisinin and artemisinin-based combination therapy resistance (April 2016 WHO/HTM/GMP/2016.5); “Drug-resistant malaria: molecular mechanisms and implications for public health” FEBS Lett. 2011 Jun. 6; 585(11):1551-62. doi:10.1016/j.febslet.2011.04.042. Epub 2011 Apr. 23. Review. PubMed PMID: 21530510; the contents of which are herewith incorporated by reference

[0531] As to polypeptides that may be detected in accordance with the present invention, gene products of all genes mentioned herein may be used as targets. Correspondingly, it is contemplated that such polypeptides could be used for species identification, typing and/or detection of drug resistance.

[0532] In certain example embodiments, the systems, devices, and methods, disclosed herein are directed to detecting the presence of one or more mosquito-borne parasite in a sample, such as a biological sample obtained from a subject. In certain example embodiments, the parasite may be selected from the species Plasmodium falciparum, Plasmodium vivax, Plasmodium ovale, Plasmodium malariae or Plasmodium knowlesi. Accordingly, the methods disclosed herein can be adapted for use in other methods (or in combination) with other methods that require quick identification of parasite species, monitoring the presence of parasites and parasite forms (for example corresponding to various stages of infection and parasite life-cycle, such as exo-erythrocytic cycle, erythrocytic cycle, sporogonic cycle; parasite forms include merozoites, sporozoites, schizonts, gametocytes); detection of certain phenotypes (e.g. pathogen drug resistance), monitoring of disease progression and/or outbreak, and treatment (drug) screening. Further, in the case of malaria, a long time may elapse following the infective bite, namely a long incubation period, during which the patient does not show symptoms. Similarly, prophylactic treatments can delay the appearance of symptoms, and long asymptomatic periods can also be observed before a relapse. Such delays can easily cause misdiagnosis or delayed diagnosis, and thus impair the effectiveness of treatment.

[0533] Because of the rapid and sensitive diagnostic capabilities of the embodiments disclosed here, detection of parasite type, down to a single nucleotide difference, and the ability to be deployed as a POC device, the embodiments disclosed herein may be used guide therapeutic regimens, such as selection of the appropriate course of treatment. The embodiments disclosed herein may also be used to screen environmental samples (mosquito population, etc.) for the presence and the typing of the parasite. The embodiments may also be modified to detect mosquito-borne parasites and other mosquito-borne pathogens simultaneously. In some instances, malaria and other mosquito-borne pathogens may present initially with similar symptoms. Thus, the ability to quickly distinguish the type of infection can guide important treatment decisions. Other mosquito-borne pathogens that may be detected in conjunction with malaria include dengue, West Nile virus, chikungunya, yellow fever, filariasis, Japanese encephalitis, Saint Louis encephalitis, western equine encephalitis, eastern equine encephalitis, Venezuelan equine encephalitis, La Crosse encephalitis, and zika.

[0534] In certain example embodiments, the devices, systems, and methods disclosed herein may be used to distinguish multiple mosquito-borne parasite species in a sample. In certain example embodiments, identification may be based on ribosomal RNA sequences, including the 18S, 16S, 23S, and 5S subunits. In certain example embodiments, identification may be based on sequences of genes that are present in multiple copies in the genome, such as mitochondrial genes like CYTB. In certain example embodiments, identification may be based on sequences of genes that are highly expressed and/or highly conserved such as GAPDH, Histone H2B, enolase, or LDH. Methods for identifying relevant rRNA sequences are disclosed in U.S. Patent Application Publication No. 2017/0029872. In certain example embodiments, a set of guide RNA may designed to distinguish each species by a variable region that is unique to each species or strain. Guide RNAs may also be designed to target RNA genes that distinguish microbes at the genus, family, order, class, phylum, kingdom levels, or a combination thereof. In certain example embodiments where amplification is used, a set of amplification primers may be designed to flanking constant regions of the ribosomal RNA sequence and a guide RNA designed to distinguish each species by a variable internal region. In certain example embodiments, the primers and guide RNAs may be designed to conserved and variable regions in the 16S subunit respectfully. Other genes or genomic regions that uniquely variable across species or a subset of species such as the RecA gene family, RNA polymerase β subunit, may be used as well. Other suitable phylogenetic markers, and methods for identifying the same, are discussed for example in Wu et al. arXiv:1307.8690 [q-bio.GN].

[0535] In certain example embodiments, species identification can be performed based on genes that are present in multiple copies in the genome, such as mitochondrial genes like CYTB. In certain example embodiments, species identification can be performed based on highly expressed and/or highly conserved genes such as GAPDH, Histone H2B, enolase, or LDH.

[0536] In certain example embodiments, a method or diagnostic is designed to screen mosquito-borne parasites across multiple phylogenetic and/or phenotypic levels at the same time. For example, the method or diagnostic may comprise the use of multiple CRISPR systems with different guide RNAs. A first set of guide RNAs may distinguish, for example, between Plasmodium falciparum or Plasmodium vivax. These general classes can be even further subdivided. For example, guide RNAs could be designed and used in the method or diagnostic that distinguish drug-resistant strains, in general or with respect to a specific drug or combination of drugs. A second set of guide RNA can be designed to distinguish microbes at the species level. Thus a matrix may be produced identifying all mosquito-borne parasites species or subspecies, further divided according to drug resistance. The foregoing is for example purposes only. Other means for classifying other types of mosquito-borne parasites are also contemplated and would follow the general structure described above.

[0537] In certain example embodiments, the devices, systems and methods disclosed herein may be used to screen for mosquito-borne parasite genes of interest, for example drug resistance genes. Guide RNAs may be designed to distinguish between known genes of interest. Samples, including clinical samples, may then be screened using the embodiments disclosed herein for detection of one or more such genes. The ability to screen for drug resistance at POC would have tremendous benefit in selecting an appropriate treatment regime. In certain example embodiments, the drug resistance genes are genes encoding proteins such as transporter proteins, such as protein from drug/metabolite transporter family, the ATP-binding cassette (ABC) protein involved in substrate translocation, such as the ABC transporter C subfamily or the Na+/H+exchanger; proteins involved in the folate pathway, such as the dihydropteroate synthase, the dihydrofolate reductase activity or the dihydrofolate reductase-thymidylate synthase; and proteins involved in the translocation of protons across the inner mitochondrial membrane and notably the cytochrome b complex. Additional targets may also include the gene(s) coding for the heme polymerase. In certain example embodiments, the drug resistance genes are selected from the P. falciparum chloroquine resistance transporter gene (pfcrt), the P. falciparum multidrug resistance transporter 1 (pfmdr1), the P. falciparum multidrug resistance-associated protein gene (Pfmrp), the P. falciparum Na+/H+exchanger gene (pfnhe), the P. falciparum Ca2+ transporting ATPase 6 (pfatp6), the P. falciparum dihydropteroate synthase (pfdhps), dihydrofolate reductase activity (pfdhpr) and dihydrofolate reductase-thymidylate synthase (pfdhfr) genes, the cytochrome b gene, gtp cyclohydrolase and the Kelch13 (K13) gene as well as their functional heterologous genes in other Plasmodium species. Other identified drug-resistance markers are known in the art, for example as described in “Susceptibility of Plasmodium falciparum to antimalarial drugs (1996-2004)”; WHO; Artemisinin and artemisinin-based combination therapy resistance (April 2016 WHO/HTM/GMP/2016.5); “Drug-resistant malaria: molecular mechanisms and implications for public health” FEBS Lett. 2011 Jun. 6; 585(11):1551-62. doi:10.1016/j.febslet.2011.04.042. Epub 2011 Apr. 23. Review. PubMed PMID: 21530510; the contents of which are herewith incorporated by reference.

[0538] In some embodiments, a CRISPR system, detection system or methods of use thereof as described herein may be used to determine the evolution of a mosquito-borne parasite outbreak. The method may comprise detecting one or more target sequences from a plurality of samples from one or more subjects, wherein the target sequence is a sequence from a mosquito-borne parasite spreading or causing the outbreaks. Such a method may further comprise determining a pattern of mosquito-borne parasite transmission, or a mechanism involved in a disease outbreak caused by a mosquito-borne parasite. The samples may be derived from one or more humans, and/or be derived from one or more mosquitoes.

[0539] The pattern of pathogen transmission may comprise continued new transmissions from the natural reservoir of the mosquito-borne parasite or other transmissions (e.g. across mosquitoes) following a single transmission from the natural reservoir or a mixture of both. In one embodiment, the target sequence is preferably a sequence within the mosquito-borne parasite genome or fragments thereof. In one embodiment, the pattern of the mosquito-borne parasite transmission is the early pattern of the mosquito-borne parasite transmission, i.e. at the beginning of the mosquito-borne parasite outbreak. Determining the pattern of the mosquito-borne parasite transmission at the beginning of the outbreak increases likelihood of stopping the outbreak at the earliest possible time thereby reducing the possibility of local and international dissemination.

[0540] Determining the pattern of the mosquito-borne parasite transmission may comprise detecting a mosquito-borne parasite sequence according to the methods described herein. Determining the pattern of the pathogen transmission may further comprise detecting shared intra-host variations of the mosquito-borne parasite sequence between the subjects and determining whether the shared intra-host variations show temporal patterns. Patterns in observed intrahost and interhost variation provide important insight about transmission and epidemiology (Gire, et al., 2014).

[0541] In addition to other sample types disclosed herein, the sample may be derived from one or more mosquitoes, for example the sample may comprise mosquito saliva.

[0542] In other embodiments, the invention provides methods for detecting a target nucleic acid in a sample, comprising contacting a sample with a nucleic acid detection system and applying said contacted sample to a lateral flow immunochromatographic assay as described herein.

[0543] As described herein, the nucleic acid detection system may comprise an RNA-based masking construct comprising a first and a second molecule, wherein the lateral flow immunochromatographic assay comprises detecting said first and second molecule, preferably at discrete detection sites on a lateral flow strip. The first and second molecules may be detected by binding to an antibody recognizing said first or second molecule and detecting said bound molecule, preferably with sandwich antibodies.

[0544] As described herein elsewhere, the lateral flow strip may comprise an upstream first antibody directed against said first molecule, and a downstream second antibody directed against said second molecule. Uncleaved RNA-based masking construct is bound by said first antibody if the target nucleic acid is not present in said sample, and cleaved RNA-based masking construct is bound both by said first antibody and said second antibody if the target nucleic acid is present in said sample.

### Lateral Flow Devices

[0545] In some embodiments, the invention provides a lateral flow device comprising a substrate comprising a first end, two or more CRISPR effector systems, two or more detection constructs, one or more first capture regions, each comprising a first binding agent, two or more second capture regions, each comprising a second binding agent. Each of the two or more CRISPR effector systems comprises a CRISPR effector protein and one or more guide sequences, each guide sequence configured to bind one or more target molecules. The first end comprises a sample loading portion and a first region loaded with a detectable ligand.

[0546] As described herein, each of the two or more detection constructs may comprise an RNA or DNA oligonucleotide, comprising a first molecule on a first end and a second molecule on a second end.

[0547] In some embodiments, the lateral flow device may comprise two CRISPR effector systems and two detection constructs. In some embodiments, the lateral flow device may comprise four CRISPR effector systems and four detection constructs.

[0548] In some embodiments, the sample loading portion may further comprise one or more amplification reagents to amplify the one or more target molecules, as described herein.

[0549] In some embodiments, a first detection construct may comprise FAM as a first molecule and biotin as a second molecule or vice versa and a second detection construct may comprise FAM as a first molecule and Digoxigenin (DIG) as a second molecule or vice versa. In some embodiments, a first detection construct may comprise Tye665 as a first molecule and Alexa-fluor-488 as a second molecule or vice versa. In some embodiments, a second detection construct may comprise Tye665 as a first molecule and FAM as a second molecule or vice versa. In some embodiments, a third detection construct comprises Tye665 as a first molecule and biotin as a second molecule or vice versa. In some embodiments, a fourth detection construct comprises Tye665 as a first molecule and DIG as a second molecule or vice versa.

[0550] As described elsewhere herein, the CRISPR effector protein may be an RNA-targeting or a DNA-targeting effector protein.

[0551] As described elsewhere herein, the CRISPR effector protein may be a DNA-targeting effector protein. In some embodiments, the DNA-targeting effector protein may be Cas12a.

[0552] As described elsewhere herein, the CRISPR effector protein may be an RNA-targeting effector protein. In some embodiments, the RNA-targeting effector protein may be C2c2. In some embodiments, the RNA-targeting effector protein may be Cas13b.

### Biomarker Detection

[0553] In certain example embodiments, the systems, devices, and methods disclosed herein may be used for biomarker detection. For example, the systems, devices and method disclosed herein may be used for SNP detection and/or genotyping. The systems, devices and methods disclosed herein may be also used for the detection of any disease state or disorder characterized by aberrant gene expression. Aberrant gene expression includes aberration in the gene expressed, location of expression and level of expression. Multiple transcripts or protein markers related to cardiovascular, immune disorders, and cancer among other diseases may be detected. In certain example embodiments, the embodiments disclosed herein may be used for cell free DNA detection of diseases that involve lysis, such as liver fibrosis and restrictive/obstructive lung disease. In certain example embodiments, the embodiments could be utilized for faster and more portable detection for pre-natal testing of cell-free DNA. The embodiments disclosed herein may be used for screening panels of different SNPs associated with, among others, cardiovascular health, lipid/metabolic signatures, ethnicity identification, paternity matching, human ID (e.g. matching suspect to a criminal database of SNP signatures). The embodiments disclosed herein may also be used for cell free DNA detection of mutations related to and released from cancer tumors. The embodiments disclosed herein may also be used for detection of meat quality, for example, by providing rapid detection of different animal sources in a given meat product. Embodiments disclosed herein may also be used for the detection of GMOs or gene editing related to DNA. As described herein elsewhere, closely related genotypes/alleles or biomarkers (e.g. having only a single nucleotide difference in a given target sequence) may be distinguished by introduction of a synthetic mismatch in the gRNA.

[0554] In an aspect, the invention relates to a method for detecting target nucleic acids in samples, comprising:

[0555] a. distributing a sample or set of samples into one or more individual discrete volumes, the individual discrete volumes comprising a CRISPR system according to the invention as described herein;

[0556] b. incubating the sample or set of samples under conditions sufficient to allow binding of the one or more guide RNAs to one or more target molecules;

[0557] c. activating the CRISPR effector protein via binding of the one or more guide RNAs to the one or more target molecules, wherein activating the CRISPR effector protein results in modification of the RNA-based masking construct such that a detectable positive signal is generated; and

[0558] d. detecting the detectable positive signal, wherein detection of the detectable positive signal indicates a presence of one or more target molecules in the sample.

### Biomarker Sample Types

[0559] The sensitivity of the assays described herein are well suited for detection of target nucleic acids in a wide variety of biological sample types, including sample types in which the target nucleic acid is dilute or for which sample material is limited. Biomarker screening may be carried out on a number of sample types including, but not limited to, saliva, urine, blood, feces, sputum, and cerebrospinal fluid. The embodiments disclosed herein may also be used to detect up- and/or down-regulation of genes. For example, a s sample may be serially diluted such that only over-expressed genes remain above the detection limit threshold of the assay.

[0560] In certain embodiments, the present invention provides steps of obtaining a sample of biological fluid (e.g., urine, blood plasma or serum, sputum, cerebral spinal fluid), and extracting the DNA. The mutant nucleotide sequence to be detected, may be a fraction of a larger molecule or can be present initially as a discrete molecule.

[0561] In certain embodiments, DNA is isolated from plasma/serum of a cancer patient. For comparison, DNA samples isolated from neoplastic tissue and a second sample may be isolated from non-neoplastic tissue from the same patient (control), for example, lymphocytes. The non-neoplastic tissue can be of the same type as the neoplastic tissue or from a different organ source. In certain embodiments, blood samples are collected and plasma immediately separated from the blood cells by centrifugation. Serum may be filtered and stored frozen until DNA extraction.

[0562] In certain example embodiments, target nucleic acids are detected directly from a crude or unprocessed sample, such as blood, serum, saliva, cerebrospinal fluid, sputum, or urine. In certain example embodiments, the target nucleic acid is cell free DNA.

[0563] Circulating Tumor Cells

[0564] In one embodiment, circulating cells (e.g., circulating tumor cells (CTC)) can be assayed with the present invention. Isolation of circulating tumor cells (CTC) for use in any of the methods described herein may be performed. Exemplary technologies that achieve specific and sensitive detection and capture of circulating cells that may be used in the present invention have been described (Mostert B, et al., Circulating tumor cells (CTCs): detection methods and their clinical relevance in breast cancer. Cancer Treat Rev. 2009; 35:463-474; and Talasaz A H, et al., Isolating highly enriched populations of circulating epithelial cells and other rare cells from blood using a magnetic sweeper device. Proc Natl Acad Sci USA. 2009; 106:3970-3975). As few as one CTC may be found in the background of 105-106 peripheral blood mononuclear cells (Ross A A, et al., Detection and viability of tumor cells in peripheral blood stem cell collections from breast cancer patients using immunocytochemical and clonogenic assay techniques. Blood. 1993, 82:2605-2610). The Cell Search® platform uses immunomagnetic beads coated with antibodies to Epithelial Cell Adhesion Molecule (EpCAM) to enrich for EPCAM-expressing epithelial cells, followed by immunostaining to confirm the presence of cytokeratin staining and absence of the leukocyte marker CD45 to confirm that captured cells are epithelial tumor cells (Momburg F, et al., Immunohistochemical study of the expression of a Mr 34,000 human epithelium-specific surface glycoprotein in normal and malignant tissues. Cancer Res. 1987; 47:2883-2891; and Allard W J, et al., Tumor cells circulate in the peripheral blood of all major carcinomas but not in healthy subjects or patients with nonmalignant diseases. Clin Cancer Res. 2004; 10:6897-6904). The number of cells captured have been prospectively demonstrated to have prognostic significance for breast, colorectal and prostate cancer patients with advanced disease (Cohen S J, et al., J Clin Oncol. 2008; 26:3213-3221; Cristofanilli M, et al. N Engl J Med. 2004; 351:781-791; Cristofanilli M, et al., J Clin Oncol. 2005; 23: 1420-1430; and de Bono J S, et al. Clin Cancer Res. 2008; 14:6302-6309).

[0565] The present invention also provides for isolating CTCs with CTC-Chip Technology. CTC-Chip is a microfluidic based CTC capture device where blood flows through a chamber containing thousands of microposts coated with anti-EpCAM antibodies to which the CTCs bind (Nagrath S, et al. Isolation of rare circulating tumor cells in cancer patients by microchip technology. Nature. 2007; 450: 1235-1239). CTC-Chip provides a significant increase in CTC counts and purity in comparison to the CellSearch® system (Maheswaran S, et al. Detection of mutations in EGFR in circulating lung-cancer cells, N Engl J Med. 2008; 359:366-377), both platforms may be used for downstream molecular analysis.

[0566] Cell-Free Chromatin

[0567] In certain embodiments, cell free chromatin fragments are isolated and analyzed according to the present invention. Nucleosomes can be detected in the serum of healthy individuals (Stroun et al., Annals of the New York Academy of Sciences 906: 161-168 (2000)) as well as individuals afflicted with a disease state. Moreover, the serum concentration of nucleosomes is considerably higher in patients suffering from benign and malignant diseases, such as cancer and autoimmune disease (Holdenrieder et al (2001) Int J Cancer 95, 1 14-120, Trejo-Becerril et al (2003) Int J Cancer 104, 663-668; Kuroi et al 1999 Breast Cancer 6, 361-364; Kuroi et al (2001) Int j Oncology 19, 143-148; Amoura et al (1997) Arth Rheum 40, 2217-2225; Williams et al (2001) J Rheumatol 28, 81-94). Not being bound by a theory, the high concentration of nucleosomes in tumor bearing patients derives from apoptosis, which occurs spontaneously in proliferating tumors. Nucleosomes circulating in the blood contain uniquely modified histones. For example, U.S. Patent Publication No. 2005/0069931 (Mar. 31, 2005) relates to the use of antibodies directed against specific histone N-terminus modifications as diagnostic indicators of disease, employing such histone-specific antibodies to isolate nucleosomes from a blood or serum sample of a patient to facilitate purification and analysis of the accompanying DNA for diagnostic/screening purposes. Accordingly, the present invention may use chromatin bound DNA to detect and monitor, for example, tumor mutations. The identification of the DNA associated with modified histones can serve as diagnostic markers of disease and congenital defects.

[0568] Thus, in another embodiment, isolated chromatin fragments are derived from circulating chromatin, preferably circulating mono and oligonucleosomes. Isolated chromatin fragments may be derived from a biological sample. The biological sample may be from a subject or a patient in need thereof. The biological sample may be sera, plasma, lymph, blood, blood fractions, urine, synovial fluid, spinal fluid, saliva, circulating tumor cells or mucous.

[0569] Cell-Free DNA (cfDNA)

[0570] In certain embodiments, the present invention may be used to detect cell free DNA (cfDNA). Cell free DNA in plasma or serum may be used as a non-invasive diagnostic tool. For example, cell free fetal DNA has been studied and optimized for testing on-compatible RhD factors, sex determination for X-linked genetic disorders, testing for single gene disorders, identification of preeclampsia. For example, sequencing the fetal cell fraction of cfDNA in maternal plasma is a reliable approach for detecting copy number changes associated with fetal chromosome aneuploidy. For another example, cfDNA isolated from cancer patients has been used to detect mutations in key genes relevant for treatment decisions.

[0571] In certain example embodiments, the present disclosure provides detecting cfDNA directly from a patient sample. In certain other example embodiment, the present disclosure provides enriching cfDNA using the enrichment embodiments disclosed above and prior to detecting the target cfDNA.

[0572] Exosomes

[0573] In one embodiment, exosomes can be assayed with the present invention. Exosomes are small extracellular vesicles that have been shown to contain RNA. Isolation of exosomes by ultracentrifugation, filtration, chemical precipitation, size exclusion chromatography, and microfluidics are known in the art. In one embodiment exosomes are purified using an exosome biomarker. Isolation and purification of exosomes from biological samples may be performed by any known methods (see e.g., WO2016172598A1).

### SNP Detection and Genotyping

[0574] In certain embodiments, the present invention may be used to detect the presence of single nucleotide polymorphisms (SNP) in a biological sample. The SNPs may be related to maternity testing (e.g., sex determination, fetal defects). They may be related to a criminal investigation. In one embodiment, a suspect in a criminal investigation may be identified by the present invention. Not being bound by a theory nucleic acid based forensic evidence may require the most sensitive assay available to detect a suspect or victim's genetic material because the samples tested may be limiting.

[0575] In other embodiments, SNPs associated with a disease are encompassed by the present invention. SNPs associated with diseases are well known in the art and one skilled in the art can apply the methods of the present invention to design suitable guide RNAs (see e.g., www.ncbi.nlm.nih.gov/clinvar?term=human%5Borgn%5D).

[0576] In an aspect, the invention relates to a method for genotyping, such as SNP genotyping, comprising:
[0577] a) distributing a sample or set of samples into one or more individual discrete volumes, the individual discrete volumes comprising a CRISPR system according to the invention as described herein;
[0578] b) incubating the sample or set of samples under conditions sufficient to allow binding of the one or more guide RNAs to one or more target molecules;
[0579] c) activating the CRISPR effector protein via binding of the one or more guide RNAs to the one or more target molecules, wherein activating the CRISPR effector protein results in modification of the RNA-based masking construct such that a detectable positive signal is generated; and
[0580] d) detecting the detectable positive signal, wherein detection of the detectable positive signal indicates a presence of one or more target molecules characteristic for a particular genotype in the sample.

[0581] In certain embodiments, the detectable signal is compared to (e.g. by comparison of signal intensity) one or more standard signal, preferably a synthetic standard signal, such as for instance illustrated in an example embodiment in FIG. 60. In certain embodiments, the standard is or corresponds to a particular genotype. In certain embodiments, the standard comprises a particular SNP or other (single) nucleotide variation. In certain embodiments, the standard is a (PCR-amplified) genotype standard. In certain embodiments, the standard is or comprises DNA. In certain embodiments, the standard is or comprises RNA. In certain embodiments, the standard is or comprised RNA which is transcribed from DNA. In certain embodiments, the standard is or comprises DNA which is reverse transcribed from RNA. In certain embodiments, the detectable signal is compared to one or more standard, each of which corresponds to a known genotype, such as a SNP or other (single) nucleotide variation. In certain embodiments, the detectable signal is compared to one or more standard signal and the comparison comprises statistical analysis, such as by parametric or non-parametric statistical analysis, such as by one- or two-way ANOVA, etc. In certain embodiments, the detectable signal is compared to one or more standard signal and when the detectable signal does not (statistically) significantly deviate from the standard, the genotype is determined as the genotype corresponding to said standard.

[0582] In other embodiments, the present invention allows rapid genotyping for emergency pharmacogenomics. In one embodiment, a single point of care assay may be used to genotype a patient brought in to the emergency room. The patient may be suspected of having a blood clot and an emergency physician needs to decide a dosage of blood thinner to administer. In exemplary embodiments, the present invention may provide guidance for administration of blood thinners during myocardial infarction or stroke treatment based on genotyping of markers such as VKORC1, CYP2C9, and CYP2C19. In one embodiment, the blood thinner is the anticoagulant warfarin (Holford, N.H. (December 1986). “Clinical Pharmacokinetics and Pharmacodynamics of Warfarin Understanding the Dose-Effect Relationship”. Clinical Pharmacokinetics. Springer International Publishing. 11 (6): 483-504). Genes associated with blood clotting are known in the art (see e.g., US20060166239A1; Litin S C, Gastineau D A (1995) “Current concepts in anticoagulant therapy”. Mayo Clin. Proc. 70 (3): 266-72; and Rusdiana et al., Responsiveness to low-dose warfarin associated with genetic variants of VKORC1, CYP2C9, CYP2C19, and CYP4F2 in an Indonesian population. Eur J Clin Pharmacol. 2013 March; 69(3):395-405). Specifically, in the VKORC1 1639 (or 3673) single-nucleotide polymorphism, the common (“wild-type”) G allele is replaced by the A allele. People with an A allele (or the “A haplotype”) produce less VKORC1 than do those with the G allele (or the “non-A haplotype”). The prevalence of these variants also varies by race, with 37% of Caucasians and 14% of Africans carrying the A allele. The end result is a decreased number of clotting factors and therefore, a decreased ability to clot.

[0583] In certain example embodiments, the availability of genetic material for detecting a SNP in a patient allows for detecting SNPs without amplification of a DNA or RNA sample. In the case of genotyping, the biological sample tested is easily obtained. In certain example embodiments, the incubation time of the present invention may be shortened. The assay may be performed in a period of time required for an enzymatic reaction to occur. One skilled in the art can perform biochemical reactions in 5 minutes (e.g., 5 minute ligation). The present invention may use an automated DNA extraction device to obtain DNA from blood. The DNA can then be added to a reaction that generates a target molecule for the effector protein. Immediately upon generating the target molecule the masking agent can be cut and a signal detected. In exemplary embodiments, the present invention allows a POC rapid diagnostic for determining a genotype before administering a drug (e.g., blood thinner). In the case where an amplification step is used, all of the reactions occur in the same reaction in a one step process. In preferred embodiments, the POC assay may be performed in less than an hour, preferably 10 minutes, 20 minutes, 30 minutes, 40 minutes, or 50 minutes.

[0584] In certain embodiments, the systems, devices, and methods disclosed herein may be used for detecting the presence or expression level of long non-coding RNAs (lncRNAs). Expression of certain lncRNAs are associated with disease state and/or drug resistance. In particular, certain lncRNAs (e.g., TCONS_00011252, NR_034078, TCONS_00010506, TCONS_00026344, TCONS_00015940, TCONS_00028298, TCONS_00026380, TCONS_0009861, TCONS_00026521, TCONS_00016127, NR_125939, NR_033834, TCONS_00021026, TCONS_00006579, NR_109890, and NR_026873) are associated with resistance to cancer treatment, such as resistance to one or more BRAF inhibitors (e.g., Vemurafenib, Dabrafenib, Sorafenib, GDC-0879, PLX-4720, and LGX818) for treating melanoma (e.g., nodular melanoma, lentigo maligna, lentigo maligna melanoma, acral lentiginous melanoma, superficial spreading melanoma, mucosal melanoma, polypoid melanoma, desmoplastic melanoma, amelanotic melanoma, and soft-tissue melanoma). The detection of lncRNAs using the various embodiments described herein can facilitate disease diagnosis and/or selection of treatment options.

[0585] In one embodiment, the present invention can guide DNA- or RNA-targeted therapies (e.g., CRISPR, TALE, Zinc finger proteins, RNAi), particularly in settings where rapid administration of therapy is important to treatment outcomes.

### LOH Detection

[0586] Cancer cells undergo a loss of genetic material (DNA) when compared to normal cells. This deletion of genetic material which almost all, if not all, cancers undergo is referred to as “loss of heterozygosity” (LOH). Loss of heterozygosity (LOH) is a gross chromosomal event that results in loss of the entire gene and the surrounding chromosomal region. The loss of heterozygosity is a common occurrence in cancer, where it can indicate the absence of a functional tumor suppressor gene in the lost region. However, a loss may be silent because there still is one functional gene left on the other chromosome of the chromosome pair. The remaining copy of the tumor suppressor gene can be inactivated by a point mutation, leading to loss of a tumor suppressor gene. The loss of genetic material from cancer cells can result in the selective loss of one of two or more alleles of a gene vital for cell viability or cell growth at a particular locus on the chromosome.

[0587] An “LOH marker” is DNA from a microsatellite locus, a deletion, alteration, or amplification in which, when compared to normal cells, is associated with cancer or other diseases. An LOH marker often is associated with loss of a tumor suppressor gene or another, usually tumor related, gene.

[0588] The term “microsatellites” refers to short repetitive sequences of DNA that are widely distributed in the human genome. A microsatellite is a tract of tandemly repeated (i.e. adjacent) DNA motifs that range in length from two to five nucleotides, and are typically repeated 5-50 times. For example, the sequence TATATATATA (SEQ ID NO: 333) is a dinucleotide microsatellite, and GTCGTCGTCGTCGTC (SEQ ID NO: 334) is a trinucleotide microsatellite (with A being Adenine, G Guanine, C Cytosine, and T Thymine). Somatic alterations in the repeat length of such microsatellites have been shown to represent a characteristic feature of tumors. Guide RNAs may be designed to detect such microsatellites. Furthermore, the present invention may be used to detect alterations in repeat length, as well as amplifications and deletions based upon quantitation of the detectable signal. Certain microsatellites are located in regulatory flanking or intronic regions of genes, or directly in codons of genes. Microsatellite mutations in such cases can lead to phenotypic changes and diseases, notably in triplet expansion diseases such as fragile X syndrome and Huntington's disease.

[0589] Frequent loss of heterozygosity (LOH) on specific chromosomal regions has been reported in many kinds of malignancies. Allelic losses on specific chromosomal regions are the most common genetic alterations observed in a variety of malignancies, thus microsatellite analysis has been applied to detect DNA of cancer cells in specimens from body fluids, such as sputum for lung cancer and urine for bladder cancer. (Rouleau, et al. Nature 363, 515-521 (1993); and Latif, et al. Science 260, 1317-1320 (1993)). Moreover, it has been established that markedly increased concentrations of soluble DNA are present in plasma of individuals with cancer and some other diseases, indicating that cell free serum or plasma can be used for detecting cancer DNA with microsatellite abnormalities. (Kamp, et al. Science 264, 436-440 (1994); and Steck, et al. Nat Genet. 15(4), 356-362 (1997)). Two groups have reported microsatellite alterations in plasma or serum of a limited number of patients with small cell lung cancer or head and neck cancer. (Hahn, et al. Science 271, 350-353 (1996); and Miozzo, et al. Cancer Res. 56, 2285-2288 (1996)). Detection of loss of heterozygosity in tumors and serum of melanoma patients has also been previously shown (see, e.g., United States patent number U.S. Pat. No. 6,465,177B1).

[0590] Thus, it is advantageous to detect of LOH markers in a subject suffering from or at risk of cancer. The present invention may be used to detect LOH in tumor cells. In one embodiment, circulating tumor cells may be used as a biological sample. In preferred embodiments, cell free DNA obtained from serum or plasma is used to noninvasively detect and/or monitor LOH. In other embodiments, the biological sample may be any sample described herein (e.g., a urine sample for bladder cancer). Not being bound by a theory, the present invention may be used to detect LOH markers with improved sensitivity as compared to any prior method, thus providing early detection of mutational events. In one embodiment, LOH is detected in biological fluids, wherein the presence of LOH is associated with the occurrence of cancer. The method and systems described herein represents a significant advance over prior techniques, such as PCR or tissue biopsy by providing a non-invasive, rapid, and accurate method for detecting LOH of specific alleles associated with cancer. Thus, the present invention provides a methods and systems which can be used to screen high-risk populations and to monitor high risk patients undergoing chemoprevention, chemotherapy, immunotherapy or other treatments.

[0591] Because the method of the present invention requires only DNA extraction from bodily fluid such as blood, it can be performed at any time and repeatedly on a single patient. Blood can be taken and monitored for LOH before or after surgery; before, during, and after treatment, such as chemotherapy, radiation therapy, gene therapy or immunotherapy; or during follow-up examination after treatment for disease progression, stability, or recurrence. Not being bound by a theory, the method of the present invention also may be used to detect subclinical disease presence or recurrence with an LOH marker specific for that patient since LOH markers are specific to an individual patient's tumor. The method also can detect if multiple metastases may be present using tumor specific LOH markers.

### Detection of Epigenetic Modifications

[0592] Histone variants, DNA modifications, and histone modifications indicative of cancer or cancer progression may be used in the present invention. For example, U.S. patent publication 20140206014 describes that cancer samples had elevated nucleosome H2AZ, macroH2A1.1, 5-methylcytosine, P-H2AX(Ser139) levels as compared to healthy subjects. The presence of cancer cells in an individual may generate a higher level of cell free nucleosomes in the blood as a result of the increased apoptosis of the cancer cells. In one embodiment, an antibody directed against marks associated with apoptosis, such as H2B Ser 14(P), may be used to identify single nucleosomes that have been released from apoptotic neoplastic cells. Thus, DNA arising from tumor cells may be advantageously analyzed according to the present invention with high sensitivity and accuracy.

### Pre-Natal Screening

[0593] In certain embodiments, the method and systems of the present invention may be used in prenatal screening. In certain embodiments, cell-free DNA is used in a method of prenatal screening. In certain embodiments, DNA associated with single nucleosomes or oligonucleosomes may be detected with the present invention. In preferred embodiments, detection of DNA associated with single nucleosomes or oligonucleosomes is used for prenatal screening. In certain embodiments, cell-free chromatin fragments are used in a method of prenatal screening.

[0594] Prenatal diagnosis or prenatal screening refers to testing for diseases or conditions in a fetus or embryo before it is born. The aim is to detect birth defects such as neural tube defects, Down syndrome, chromosome abnormalities, genetic disorders and other conditions, such as spina bifida, cleft palate, Tay Sachs disease, sickle cell anemia, thalassemia, cystic fibrosis, Muscular dystrophy, and fragile X syndrome. Screening can also be used for prenatal sex discernment. Common testing procedures include amniocentesis, ultrasonography including nuchal translucency ultrasound, serum marker testing, or genetic screening. In some cases, the tests are administered to determine if the fetus will be aborted, though physicians and patients also find it useful to diagnose high-risk pregnancies early so that delivery can be scheduled in a tertian,’ care hospital where the baby can receive appropriate care.

[0595] It has been realized that there are fetal cells which are present in the mother's blood, and that these cells present a potential source of fetal chromosomes for prenatal DNA-based diagnostics. Additionally, fetal DNA ranges from about 2-10% of the total DNA in maternal blood. Currently available prenatal genetic tests usually involve invasive procedures. For example, chorionic villus sampling (CVS) performed on a pregnant woman around 10-12 weeks into the pregnancy and amniocentesis performed at around 14-16 weeks all contain invasive procedures to obtain the sample for testing chromosomal abnormalities in a fetus. Fetal cells obtained via these sampling procedures are usually tested for chromosomal abnormalities using cytogenetic or fluorescent in situ hybridization (FISH) analyses. Cell-free fetal DNA has been shown to exist in plasma and serum of pregnant women as early as the sixth week of gestation, with concentrations rising during pregnancy and peaking prior to parturition. Because these cells appear very early in the pregnancy, they could form the basis of an accurate, noninvasive, first trimester test. Not being bound by a theory, the present invention provides unprecedented sensitivity in detecting low amounts of fetal DNA. Not being bound by a theory, abundant amounts of maternal DNA is generally concomitantly recovered along with the fetal DNA of interest, thus decreasing sensitivity in fetal DNA quantification and mutation detection. The present invention overcomes such problems by the unexpectedly high sensitivity of the assay.

[0596] The H3 class of histones consists of four different protein types: the main types, H3.1 and H3.2; the replacement type, H3.3; and the testis specific variant, H3t. Although H3.1 and H3.2 are closely related, only differing at Ser96, H3.1 differs from H3.3 in at least 5 amino acid positions. Further, H3.1 is highly enriched in fetal liver, in comparison to its presence in adult tissues including liver, kidney and heart. In adult human tissue, the H3.3 variant is more abundant than the H3.1 variant, whereas the converse is true for fetal liver. The present invention may use these differences to detect fetal nucleosomes and fetal nucleic acid in a maternal biological sample that comprises both fetal and maternal cells and/or fetal nucleic acid.

[0597] In one embodiment, fetal nucleosomes may be obtained from blood. In other embodiments, fetal nucleosomes are obtained from a cervical mucus sample. In certain embodiments, a cervical mucus sample is obtained by swabbing or lavage from a pregnant woman early in the second trimester or late in the first trimester of pregnancy. The sample may be placed in an incubator to release DNA trapped in mucus. The incubator may be set at 37° C. The sample may be rocked for approximately 15 to 30 minutes. Mucus may be further dissolved with a mucinase for the purpose of releasing DNA. The sample may also be subjected to conditions, such as chemical treatment and the like, as well known in the art, to induce apoptosis to release fetal nucleosomes. Thus, a cervical mucus sample may be treated with an agent that induces apoptosis, whereby fetal nucleosomes are released. Regarding enrichment of circulating fetal DNA, reference is made to U.S. patent publication Nos. 20070243549 and 20100240054. The present invention is especially advantageous when applying the methods and systems to prenatal screening where only a small fraction of nucleosomes or DNA may be fetal in origin.

[0598] Prenatal screening according to the present invention may be for a disease including, but not limited to Trisomy 13, Trisomy 16, Trisomy 18, Klinefelter syndrome (47, XXY), (47, XYY) and (47, XXX), Turner syndrome, Down syndrome (Trisomy 21), Cystic Fibrosis, Huntington's Disease, Beta Thalassaemia, Myotonic Dystrophy, Sickle Cell Anemia, Porphyria, Fragile-X-Syndrome, Robertsonian translocation, Angelman syndrome, DiGeorge syndrome and Wolf-Hirschhorn Syndrome.

[0599] Several further aspects of the invention relate to diagnosing, prognosing and/or treating defects associated with a wide range of genetic diseases which are further described on the website of the National Institutes of Health under the topic subsection Genetic Disorders (website at health.nih.gov/topic/Genetic Disorders).

### Cancer and Cancer Drug Resistance Detection

[0600] In certain embodiments, the present invention may be used to detect genes and mutations associated with cancer. In certain embodiments, mutations associated with resistance are detected. The amplification of resistant tumor cells or appearance of resistant mutations in clonal populations of tumor cells may arise during treatment (see, e.g., Burger J A, et al., Clonal evolution in patients with chronic lymphocytic leukaemia developing resistance to BTK inhibition. Nat Commun. 2016 May 20; 7:11589; Landau D A, et al., Mutations driving CLL and their evolution in progression and relapse. Nature. 2015 Oct. 22; 526(7574):525-30; Landau D A, et al., Clonal evolution in hematological malignancies and therapeutic implications. Leukemia. 2014 January; 28(1):34-43; and Landau D A, et al., Evolution and impact of subclonal mutations in chronic lymphocytic leukemia. Cell. 2013 Feb. 14; 152(4):714-26). Accordingly, detecting such mutations requires highly sensitive assays and monitoring requires repeated biopsy. Repeated biopsies are inconvenient, invasive and costly. Resistant mutations can be difficult to detect in a blood sample or other noninvasively collected biological sample (e.g., blood, saliva, urine) using the prior methods known in the art. Resistant mutations may refer to mutations associated with resistance to a chemotherapy, targeted therapy, or immunotherapy.

[0601] In certain embodiments, mutations occur in individual cancers that may be used to detect cancer progression. In one embodiment, mutations related to T cell cytolytic activity against tumors have been characterized and may be detected by the present invention (see e.g., Rooney et al., Molecular and genetic properties of tumors associated with local immune cytolytic activity, Cell. 2015 Jan. 15; 160(1-2): 48-61). Personalized therapies may be developed for a patient based on detection of these mutations (see e.g., WO2016100975A1). In certain embodiments, cancer specific mutations associated with cytolytic activity may be a mutation in a gene selected from the group consisting of CASP8, B2M, PIK3CA, SMC1A, ARID5B, TET2, ALPK2, COL5A1, TP53, DNER, NCOR1, MORC4, CIC, IRF6, MYOCD, ANKLE1, CNKSR1, NF1, SOS1, ARID2, CUL4B, DDX3X, FUBP1, TCP11L2, HLA-A, B or C, CSNK2A1, MET, ASXL1, PD-L1, PD-L2, IDO1, IDO2, ALOX12B and ALOX15B, or copy number gain, excluding whole-chromosome events, impacting any of the following chromosomal bands: 6q16.1-q21, 6q22.31-q24.1, 6q25.1-q26, 7p11.2-q11.1, 8p23.1, 8p11.23-p11.21 (containing IDO1, IDO2), 9p24.2-p23 (containing PDL1, PDL2), 10p15.3, 10p15.1-p13, 11p14.1, 12p13.32-p13.2, 17p13.1 (containing ALOX12B, ALOX15B), and 22q11.1-q11.21.

[0602] In certain embodiments, the present invention is used to detect a cancer mutation (e.g., resistance mutation) during the course of a treatment and after treatment is completed. The sensitivity of the present invention may allow for noninvasive detection of clonal mutations arising during treatment and can be used to detect a recurrence in the disease.

[0603] In certain example embodiments, detection of microRNAs (miRNA) and/or miRNA signatures of differentially expressed miRNA, may be used to detect or monitor progression of a cancer and/or detect drug resistance to a cancer therapy. As an example, Nadal et al. (Nature Scientific Reports, (2015) doi:10.1038/srep12464) describe mRNA signatures that may be used to detect non-small cell lung cancer (NSCLC).

[0604] In certain example embodiments, the presence of resistance mutations in clonal subpopulations of cells may be used in determining a treatment regimen. In other embodiments, personalized therapies for treating a patient may be administered based on common tumor mutations. In certain embodiments, common mutations arise in response to treatment and lead to drug resistance. In certain embodiments, the present invention may be used in monitoring patients for cells acquiring a mutation or amplification of cells harboring such drug resistant mutations.

[0605] Treatment with various chemotherapeutic agents, particularly with targeted therapies such as tyrosine kinase inhibitors, frequently leads to new mutations in the target molecules that resist the activity of the therapeutic. Multiple strategies to overcome this resistance are being evaluated, including development of second generation therapies that are not affected by these mutations and treatment with multiple agents including those that act downstream of the resistance mutation. In an exemplary embodiment, a common mutation to ibrutinib, a molecule targeting Bruton's Tyrosine Kinase (BTK) and used for CLL and certain lymphomas, is a Cysteine to Serine change at position 481 (BTK/C481S). Erlotinib, which targets the tyrosine kinase domain of the Epidermal Growth Factor Receptor (EGFR), is commonly used in the treatment of lung cancer and resistant tumors invariably develop following therapy. A common mutation found in resistant clones is a threonine to methionine mutation at position 790.

[0606] Non-silent mutations shared between populations of cancer patients and common resistant mutations that may be detected with the present invention are known in the art (see e.g., WO/2016/187508). In certain embodiments, drug resistance mutations may be induced by treatment with ibrutinib, erlotinib, imatinib, gefitinib, crizotinib, trastuzumab, vemurafenib, RAF/MEK, check point blockade therapy, or antiestrogen therapy. In certain embodiments, the cancer specific mutations are present in one or more genes encoding a protein selected from the group consisting of Programmed Death-Ligand 1 (PD-L1), androgen receptor (AR), Bruton's Tyrosine Kinase (BTK), Epidermal Growth Factor Receptor (EGFR), BCR-Abl, c-kit, PIK3CA, HER2, EML4-ALK, KRAS, ALK, ROS1, AKT1, BRAF, MEK1, MEK2, NRAS, RAC1, and ESR1.

[0607] Immune checkpoints are inhibitory pathways that slow down or stop immune reactions and prevent excessive tissue damage from uncontrolled activity of immune cells. In certain embodiments, the immune checkpoint targeted is the programmed death-1 (PD-1 or CD279) gene (PDCD1). In other embodiments, the immune checkpoint targeted is cytotoxic T-lymphocyte-associated antigen (CTLA-4). In additional embodiments, the immune checkpoint targeted is another member of the CD28 and CTLA4 Ig superfamily such as BTLA, LAG3, ICOS, PDL1 or KIR. In further additional embodiments, the immune checkpoint targeted is a member of the TNFR superfamily such as CD40, OX40, CD137, GITR, CD27 or TIM-3.

[0608] Recently, gene expression in tumors and their microenvironments have been characterized at the single cell level (see e.g., Tirosh, et al. Dissecting the multicellular ecosystem of metastatic melanoma by single cell RNA-seq. Science 352, 189-196, doi:10.1126/science.aad0501 (2016)); Tirosh et al., Single-cell RNA-seq supports a developmental hierarchy in human oligodendroglioma. Nature. 2016 Nov. 10; 539(7628):309-313. doi: 10.1038/nature20123. Epub 2016 Nov. 2; and International patent publication serial number WO 2017004153 A1). In certain embodiments, gene signatures may be detected using the present invention. In one embodiment complement genes are monitored or detected in a tumor microenvironment. In one embodiment MITF and AXL programs are monitored or detected. In one embodiment, a tumor specific stem cell or progenitor cell signature is detected. Such signatures indicate the state of an immune response and state of a tumor. In certain embodiments, the state of a tumor in terms of proliferation, resistance to treatment and abundance of immune cells may be detected.

[0609] Thus, in certain embodiments, the invention provides low-cost, rapid, multiplexed cancer detection panels for circulating DNA, such as tumor DNA, particularly for monitoring disease recurrence or the development of common resistance mutations.

### Immunotherapy Applications

[0610] The embodiments disclosed herein can also be useful in further immunotherapy contexts. For instance, in some embodiments methods of diagnosing, prognosing and/or staging an immune response in a subject comprise detecting a first level of expression, activity and/or function of one or more biomarker and comparing the detected level to a control level wherein a difference in the detected level and the control level indicates that the presence of an immune response in the subject.

[0611] In certain embodiments, the present invention may be used to determine dysfunction or activation of tumor infiltrating lymphocytes (TIL). TILs may be isolated from a tumor using known methods. The TILs may be analyzed to determine whether they should be used in adoptive cell transfer therapies. Additionally, chimeric antigen receptor T cells (CAR T cells) may be analyzed for a signature of dysfunction or activation before administering them to a subject. Exemplary signatures for dysfunctional and activated T cell have been described (see e.g., Singer M, et al., A Distinct Gene Module for Dysfunction Uncoupled from Activation in Tumor-Infiltrating T Cells. Cell. 2016 Sep. 8; 166(6):1500-1511.e9. doi: 10.1016/j.cell.2016.08.052).

[0612] In some embodiments, C2c2 is used to evaluate that state of immune cells, such as T cells (e.g., CD8+ and/or CD4+ T cells). In particular, T cell activation and/or dysfunction can be determined, e.g., based on genes or gene signatures associated with one or more of the T cell states. In this way, c2c2 can be used to determine the presence of one or more subpopulations of T cells.

[0613] In some embodiments, C2c2 can be used in a diagnostic assay or may be used as a method of determining whether a patient is suitable for administering an immunotherapy or another type of therapy. For example, detection of gene or biomarker signatures may be performed via c2c2 to determine whether a patient is responding to a given treatment or, if the patient is not responding, if this may be due to T cell dysfunction. Such detection is informative regarding the types of therapy the patient is best suited to receive. For example, whether the patient should receive immunotherapy.

[0614] In some embodiments, the systems and assays disclosed herein may allow clinicians to identify whether a patient's response to a therapy (e.g., an adoptive cell transfer (ACT) therapy) is due to cell dysfunction, and if it is, levels of up-regulation and down-regulation across the biomarker signature will allow problems to be addressed. For example, if a patient receiving ACT is non-responsive, the cells administered as part of the ACT may be assayed by an assay disclosed herein to determine the relative level of expression of a biomarker signature known to be associated with cell activation and/or dysfunction states. If a particular inhibitory receptor or molecule is up-regulated in the ACT cells, the patient may be treated with an inhibitor of that receptor or molecule. If a particular stimulatory receptor or molecule is down-regulated in the ACT cells, the patient may be treated with an agonist of that receptor or molecule.

[0615] In certain example embodiments, the systems, methods, and devices described herein may be used to screen gene signatures that identify a particular cell type, cell phenotype, or cell state. Likewise, through the use of such methods as compressed sensing, the embodiments disclosed herein may be used to detect transcriptomes. Gene expression data are highly structured, such that the expression level of some genes is predictive of the expression level of others. Knowledge that gene expression data are highly structured allows for the assumption that the number of degrees of freedom in the system are small, which allows for assuming that the basis for computation of the relative gene abundances is sparse. It is possible to make several biologically motivated assumptions that allow Applicants to recover the nonlinear interaction terms while under-sampling without having any specific knowledge of which genes are likely to interact. In particular, if Applicants assume that genetic interactions are low rank, sparse, or a combination of these, then the true number of degrees of freedom is small relative to the complete combinatorial expansion, which enables Applicants to infer the full nonlinear landscape with a relatively small number of perturbations. Working around these assumptions, analytical theories of matrix completion and compressed sensing may be used to design under-sampled combinatorial perturbation experiments. In addition, a kernel-learning framework may be used to employ under-sampling by building predictive functions of combinatorial perturbations without directly learning any individual interaction coefficient Compresses sensing provides a way to identify the minimal number of target transcripts to be detected in order obtain a comprehensive gene-expression profile. Methods for compressed sensing are disclosed in PCT/US2016/059230 “Systems and Methods for Determining Relative Abundances of Biomolecules” filed Oct. 27, 2016, which is incorporated herein by reference. Having used methods like compressed sensing to identify a minimal transcript target set, a set of corresponding guide RNAs may then be designed to detect said transcripts. Accordingly, in certain example embodiments, a method for obtaining a gene-expression profile of cell comprises detecting, using the embodiments disclosed, herein a minimal transcript set that provides a gene-expression profile of a cell or population of cells.

Detecting Gene Edits and/or Off-Target Effects

[0616] The embodiments disclosed herein may be used in combination with other gene editing tools to confirm that a desired genetic edit or edits were successful and/or to detect the presence of any off-target effects. Cells that have been edited may be screened using one or more guides to one or more target loci. As the embodiments disclosed herein utilize CRISPR systems, theranostic applications are also envisioned. For example, genotyping embodiments disclosed herein may be used to select appropriate target loci or identify cells or populations of cells in needed of the target edit. The same or separate system may then be used to determine editing efficiency. As described in the Working Examples below, the embodiments disclosed herein may be used to design streamlined theranostic pipelines in as little as one week.

### Detecting Nucleic Acid Tagged Items

[0617] Alternatively, the embodiments described herein may be used to detect nucleic acid identifiers. Nucleic acid identifiers are non-coding nucleic acids that may be used to identify a particular article. Example nucleic acid identifiers, such as DNA watermarks, are described in Heider and Barnekow. “DNA watermarks: A proof of concept” BMC Molecular Biology 9:40 (2008). The nucleic acid identifiers may also be a nucleic acid barcode. A nucleic-acid based barcode is a short sequence of nucleotides (for example, DNA, RNA, or combinations thereof) that is used as an identifier for an associated molecule, such as a target molecule and/or target nucleic acid. A nucleic acid barcode can have a length of at least, for example, 4, 5, 6, 7, 8, 9, 10, 11, 12, 13, 14, 15, 16, 17, 18, 19, 20, 21, 22, 23, 24, 25, 26, 27, 28, 29, 30, 35, 40, 45, 50, 60, 70, 80, 90, or 100 nucleotides, and can be in single- or double-stranded form. One or more nucleic acid barcodes can be attached, or “tagged,” to a target molecule and/or target nucleic acid. This attachment can be direct (for example, covalent or non-covalent binding of the barcode to the target molecule) or indirect (for example, via an additional molecule, for example, a specific binding agent, such as an antibody (or other protein) or a barcode receiving adaptor (or other nucleic acid molecule). Target molecule and/or target nucleic acids can be labeled with multiple nucleic acid barcodes in combinatorial fashion, such as a nucleic acid barcode concatemer. Typically, a nucleic acid barcode is used to identify target molecules and/or target nucleic acids as being from a particular compartment (for example a discrete volume), having a particular physical property (for example, affinity, length, sequence, etc.), or having been subject to certain treatment conditions. Target molecule and/or target nucleic acid can be associated with multiple nucleic acid barcodes to provide information about all of these features (and more). Methods of generating nucleic acid-barcodes are disclosed, for example, in International Patent Application Publication No. WO/2014/047561.

### Enzymes

[0618] The application further provides orthologs of C2c2 which demonstrate robust activity making them particularly suitable for different applications of RNA cleavage and detection. These applications include but are not limited to those described herein. More particularly, an ortholog which is demonstrated to have stronger activity than others tested is the C2c2 ortholog identified from the organism Leptotrichia wadei (LwC2c2). The application thus provides methods for modifying a target locus of interest, comprising delivering to said locus a non-naturally occurring or engineered composition comprising a C2c2 effector protein, more particularly a C2c2 effector protein with increased activity as described herein and one or more nucleic acid components, wherein at least the one or more nucleic acid components is engineered, the one or more nucleic acid components directs the complex to the target of interest and the effector protein forms a complex with the one or more nucleic acid components and the complex binds to the target locus of interest. In particular embodiments, the target locus of interest comprises RNA. The application further provides for the use of the Cc2 effector proteins with increased activity in RNA sequence specific interference, RNA sequence specific gene regulation, screening of RNA or RNA products or lincRNA or non-coding RNA, or nuclear RNA, or mRNA, mutagenesis, Fluorescence in situ hybridization, or breeding.

[0619] The invention is further described in the following examples, which do not limit the scope of the invention described in the claims.

### WORKING EXAMPLES

### Example 1—General Protocols

[0620] Provided are two ways to perform a C2c2 diagnostic test for DNA and RNA. This protocol may also be used with protein detection variants after delivery of the detection aptamers. The first is a two step reaction where amplification and C2c2 detection are done separately. The second is where everything is combined in one reaction and this is called a two-step reaction. It is important to keep in mind that amplification might not be necessary for higher concentration samples so it's good to have a separate C2c2 protocol that doesn't have amplification built in.

TABLE 11
CRISPR Effector Only - No amplification:

| Component | Volume (μL) |
|---|---|
| Protein (44 nM final) | 2 |
| crRNA (12 nM final) | 1 |
| background target (100 ng total) | 1 |
| Target RNA (variable) | 1 |
| RNA sensor probe (125 nM) | 4 |
| MgCl₂ (6 mM final) | 2 |
| Reaction Buffer 10x | 2 |
| RNAse Inhibitors (murine from NEB) | 2 |
| H₂O | 5 |
| Total | 20 |

[0621] Reaction buffer is: 40 mM Tris-HCl, 60 mM NaCl, pH 7.3

[0622] Perform this reaction for 20 min-3 hrs at 37° C. Read out with excitation: 485 nm/20 nm, emission: 528 nm/20 nm. A signal for single molecule sensitivity may be detected beginning at 20 min but of course sensitivity is higher for longer reaction times.

### Two Step Reaction:

### RPA Amplification Mix

TABLE 12

| Component | Volume (μL) |
|---|---|
| Primer A (100 μM) | 0.48 |
| Primer B (100 μM) | 0.48 |
| RPA Buffer | 59 |
| MgAc | 5 |
| Target (variable concentration) | 5 |
| ATP (100 μM from NEB kit) | 2 |
| GTP (100 μM from NEB kit) | 2 |
| UTP (100 μM from NEB kit) | 2 |
| CTP (100 μM from NEB kit) | 2 |
| T7 Polymerase (from NEB kit) | 2 |
| H₂O | 25 |
| Total | 104.96 |

[0624] Mix this reaction together and then re-suspend two to three tubes of freeze-dried enzyme mix). Add 5 μL of 280 mM MgAc to the mix to begin the reaction. Preform reaction for 10-20 min. Each reaction is 20 μL so this is enough for up to five reactions.

TABLE 13
C2c2 detection mix

| Component | Volume (μL) |
|---|---|
| Protein (44 nM final) | 2 |
| crRNA (12 nM final) | 1 |
| background target (100 ng total) | 1 |
| RPA reaction | 1 |
| RNA sensor probe (125 nM) | 4 |
| MgCl₂ (6 mM final) | 2 |
| Reaction Buffer 10x | 2 |
| RNAse Inhibitors (murine from NEB) | 2 |
| H₂O | 5 |
| Total | 20 |

[0625] Reaction buffer is: 40 mM Tris-HCl, 60 mM NaCl, pH 7.3

[0626] Perform this for 20 min-3 hours. Minimum detection time is about 20 min to see single molecule sensitivity. Performing the reaction for longer only boosts the sensitivity.

TABLE 14
One pot reaction:

| Component | Volume (μL) |
|---|---|
| Primer A (100 μM) | 0.48 |
| Primer B (100 μM) | 0.48 |
| RPA Buffer | 59 |
| MgAc | 5 |
| Lw2C2c2 (44 nM final) | 2 |
| crRNA (12 nM final) | 2 |
| Background RNA (from 250 ng/μL) | 2 |
| RNAse alert substr (after resuspending in 20 μL) | 5 |
| murine RNAse inhib from NEB | 10 |
| Target (variable concentration) | 5 |
| ATP (100 μM from NEB kit) | 2 |
| GTP (100 μM from NEB kit) | 2 |
| UTP (100 μM from NEB kit) | 2 |
| CTP (100 μM from NEB kit) | 2 |
| T7 Polymerase (from NEB kit) | 2 |
| H₂O | 4 |
| Total | 104.96 |

[0627] The NEB kit referenced is the HighScribe T7 High Yield Kit. To resuspend buffer, use a 1.5× concentration: resuspend three tubes of freeze dried substrate in 59 μL of buffer and use in the mix above. Each reaction is 20 μL so this is enough for 5 reactions worth. Single molecule sensitivity with this reaction has been observed in as early as 30-40 min.

### Example 2—C2C2 from Leptotrichia wadei Mediates Highly Sensitive and Specific Detection of DNA and RNA

[0628] Rapid, inexpensive, and sensitive nucleic acid detection may aid point-of-care pathogen detection, genotyping, and disease monitoring. The RNA-guided, RNA-targeting CRISPR effector Cas13a (previously known as C2c2) exhibits a “collateral effect” of promiscuous RNAse activity upon target recognition. Applicant combined the collateral effect of Cas13a with isothermal amplification to establish a CRISPR-based diagnostic (CRISPR-Dx), providing rapid DNA or RNA detection with attomolar sensitivity and single-base mismatch specificity. Applicant used this Cas13a-based molecular detection platform, termed SHERLOCK (Specific High Sensitivity Enzymatic Reporter UnLOCKing), to detect specific strains of Zika and Dengue virus, distinguish pathogenic bacteria, genotype human DNA, and identify cell-free tumor DNA mutations. Furthermore, SHERLOCK reaction reagents can be lyophilized for cold-chain independence and long-term storage, and readily reconstituted on paper for field applications.

[0629] The ability to rapidly detect nucleic acids with high sensitivity and single-base specificity on a portable platform may aid in disease diagnosis and monitoring, epidemiology, and general laboratory tasks. Although methods exist for detecting nucleic acids (1-6), they have trade-offs among sensitivity, specificity, simplicity, cost, and speed. Microbial Clustered Regularly Interspaced Short Palindromic Repeats (CRISPR) and CRISPR-associated (CRISPR-Cas) adaptive immune systems contain programmable endonucleases that can be leveraged for CRISPR-based diagnostics (CRISPR-Dx). While some Cas enzymes target DNA (7, 8), single effector RNA-guided RNases, such as Cas13a (previously known as C2c2) (8), can be reprogrammed with CRISPR RNAs (crRNAs) (9-11) to provide a platform for specific RNA sensing. Upon recognition of its RNA target, activated Cas13a engages in “collateral” cleavage of nearby non-targeted RNAs (10). This crRNA-programmed collateral cleavage activity allows Cas13a to detect the presence of a specific RNA in vivo by triggering programmed cell death (10) or in vitro by nonspecific degradation of labeled RNA (10, 12). Here Applicant describes SHERLOCK (Specific High Sensitivity Enzymatic Reporter UnLOCKing), an in vitro nucleic acid detection platform with attomolar sensitivity based on nucleic acid amplification and 3 Cas13a-mediated collateral cleavage of a commercial reporter RNA (12), allowing for real-time detection of the target (FIG. 17).

### Methods

### Cloning of C2c2 Loci and Proteins for Expression

[0630] For the bacterial in vivo efficiency assay, C2c2 proteins from Leptotrichia wadei F0279 and Leptotrichia shahii were ordered as codon-optimized genes for mammalian expression (Genscript, Jiangsu, China) and cloned into pACYC184 backbones along with the corresponding direct repeats flanking either a beta-lactamase targeting or non-targeting spacer. Spacer expression was driven by a J23119 promoter.

[0631] For protein purification, mammalian codon-optimized C2c2 proteins were cloned into bacterial expression vector for protein purification (6× His/Twin Strep SUMO, a pET-based expression vector received as a gift from Ilya Finkelstein).

### Bacterial In Vivo C2c2 Efficiency Assay

[0632] LwC2c2 and LshC2c2 in vivo efficiency plasmids and a previously described beta-lactamase plasmid (Abudayyeh 2016) were co-transformed into NovaBlue Singles competent cells (Millipore) at 90 ng and 25 ng, respectively. After transformation, dilutions of cells were plated on ampicillin and choramphicol LB-agar plate and incubated overnight at 37 C. Colonies were counted the next day.

Nucleic Acid Target and crRNA Preparation

[0633] Nucleic acid targets were PCR amplified with KAPA Hifi Hot Start (Kapa Biosystems), gel extracted and purified using MinElute gel extraction kit (Qiagen). Purified dsDNA was incubated with T7 polymerase overnight at 30° C. using the HiScribe T7 Quick High Yield RNA Synthesis kit (New England Biolabs) and RNA was purified with the MEGAclear Transcription Clean-up kit (Thermo Fisher).

[0634] For preparation of crRNA, constructs were ordered as DNA (Integrated DNA Technologies) with an appended T7 promoter sequence. crRNA DNA was annealed to a short T7 primer (final concentrations 10 uM) and incubated with T7 polymerase overnight at 37° C. using the HiScribe T7 Quick High Yield RNA Synthesis kit (New England Biolabs). crRNA were purified using RNAXP clean beads (Beckman Coulter) at 2× ratio of beads to reaction volume, with an additional 1.8× supplementation of isopropanol (Sigma).

### NASBA Isothermal Amplification

[0635] Details of NASBA reaction are described in [Pardee 2016]. For a 20 μL total reaction volume, 6.7 μL of reaction buffer (Life Sciences, NECB-24), 3.3 μL of Nucleotide Mix (Life Sciences, NECN-24), 0.5 μL of nuclease-free water, 0.4 μL of 12.5 μM NASBA primers, 0.1 uL of RNase inhibitor (Roche, 03335402001) and 4 μL of RNA amplicon (or water for the negative control) were assembled at 4° C. and incubated 65° C. for 2 min and then 41° C. for 10 min. 5 μL of enzyme mix (Life Sciences, NEC-1-24) was added to each reaction, and the reaction mixture was incubated at 41° C. for 2 hr. NASBA primers used were 5′-AATTCTAATACGACTCACTATAGGGGGATCCTCTAGAAATATGGATT-3′ (SEQ ID NO:335) and 5′-CTCGTATGTTGTGTGGAATTGT-3′ (SEQ ID NO:336) and the underlined part indicates T7 promoter sequence.

### Recombinase Polymerase Amplification

[0636] Primers for RPA were designed using NCBI Primer blast (Ye et al., BMC Bioinformaics 13, 134 (2012) using default parameters, with the exception of amplicon size (between 100 and 140 nt), primer melting temperatures (between 54C and 67C) and primer size (between 30 and 35 nt). Primers were then ordered as DNA (Integrated DNA Technologies).

[0637] RPA and RT-RPA reactions run were as instructed with TwistAmp® Basic or TwistAmp® Basic RT (TwistDx), respectively, with the exception that 280 mM MgAc was added prior to the input template. Reactions were run with 1 uL of input for 2 hr at 37 C, unless otherwise described.

### LwC2c2 Protein Purification

[0638] C2c2 bacterial expression vectors were transformed into Rosetta™ 2(DE3) pLysS Singles Competent Cells (Millipore). A 16 mL starter culture was grown in Terrific Broth 4 growth media (12 g/L tryptone, 24 g/L yeast extract, 9.4 g/L K2HPO, 2.2 g/L KH2PO4, Sigma) (TB) was used to inoculate 4 L of TB, which was incubated at 37 C, 300 RPM until an OD600 of 0.6. At this time, protein expression was induced by supplementation with IPTG (Sigma) to a final concentration of 500 uM, and cells were cooled to 18 C for 16h for protein expression. Cells were then centrifuged at 5200 g, 15 min, 4 C. Cell pellet was harvested and stored at −80 C for later purification.

[0639] All subsequent steps of the protein purification are performed at 4 C. Cell pellet was crushed and resuspended in lysis buffer (20 mM Tris-Hcl, 500 mM NaCl, 1 mM DTT, pH 8.0) supplemented with protease inhibitors (Complete Ultra EDTA-free tablets), lysozyme, and benzonase followed by sonication (Sonifier 450, Branson, Danbury, Conn.) with the following conditions: amplitude of 100 for 1 second on and 2 seconds off with a total sonication time of 10 minutes. Lysate was cleared by centrifugation for 1 hour at 4 C at 10,000 g and the supernatant was filtered through a Stericup 0.22 micron filter (EMD Millipore). Filtered supernatant was applied to StrepTactin Sepharose (GE) and incubated with rotation for 1 hour followed by washing of the protein-bound StrepTactin resin three times in lysis buffer. The resin was resuspended in SUMO digest buffer (30 mM Tris-HCl, 500 mM NaCl 1 mM DTT, 0.15% Igepal (NP-40), pH 8.0) along with 250 Units of SUMO protease (ThermoFisher) and incubated overnight at 4 C with rotation. Digestion was confirmed by SDS-PAGE and Commassie Blue staining and the protein eluate was isolated by spinning the resin down. Protein was loaded onto a 5 mL HiTrap SP HP cation exchange column (GE Healthcare Life Sciences) via FPLC (AKTA PURE, GE Healthcare Life Sciences) and eluted over a salt gradient from 130 mM to 2M NaCl in elution buffer (20 mM Tris-HCl, 1 mM DTT, 5% Glycerol, pH 8.0). The resulting fractions were tested for presence of LwC2c2 by SDS-PAGE and fractions containing the protein were pooled and concentrated via a Centrifugal Filter Unit to 1 mL in 5200 buffer (10 mM HEPES, 1M NaCl, 5 mM MgCl2, 2 mM DTT, pH 7.0). The concentrated protein was loaded onto a gel filtration column (Superdex® 200 Increase 10/300 GL, GE Healthcare Life Sciences) via FPLC. The resulting fractions from gel filtration were analyzed by SDS-PAGE and fractions containing LwC2c2 were pooled and buffer exchanged into Storage Buffer (600 mM NaCl, 50 mM Tris-HCl pH 7.5, 5% Glycerol, 2 mM DTT) and frozen at −80C for storage.

### LwC2c2 Collateral Detection

[0640] Detection assays were performed with 45 nM purified LwC2c2, 22.5 nM crRNA, 125 nM substrate reporter (Thermo Scientific RNAse Alert v2), 2 μL murine RNase inhibitors, 100 ng of background total RNA and varying amounts of input nucleic acid target, unless otherwise indicated, in nuclease assay buffer (40 mM Tris-HCl, 60 mM NaCl, 6 mM MgCl2, pH 7.3). If the input was amplified DNA including a T7 promoter from a RPA reaction, the above C2c2 reaction was modified to include 1 mM ATP, 1 mM GTP, 1 mM UTP, 1 mM CTP and 0.6 μL T7 polymerase mix (NEB). Reactions were allowed to proceed for 1-3 hours at 37° C. (unless otherwise indicated) on a fluorescent plate reader (BioTek) with fluorescent kinetics measured every 5 minutes.

[0641] The one-pot reaction combining, RPA-DNA amplification, T7 polymerase conversion of DNA to RNA and C2c2 detection was performed by integrating the reaction conditions above with the RPA amplification mix. Briefly, in a 50 μL one-pot assay consisted of 0.48 μM forward primer, 0.48 μM reverse primer, lx RPA rehydration buffer, varying amounts of DNA input, 45 nM LwC2c2 recombinant protein, 22.5 nM crRNA, 250 ng background total RNA, 200 nM substrate reporter (RNase alert v2), 4 uL RNase inhibitor, 2 mM ATP, 2 mM GTP, 2 mM UTP, 2 mM CTP, 1 μL T7 polymerase mix, 5 mM MgCl2, and 14 mM MgAc.

Quantitative PCR (qPCR) Analysis with TaqMan Probes

[0642] To compare SHERLOCK quantification with other established methods, qPCR on a dilution series of ssDNA 1 was performed. A TaqMan probe and primer set (sequences below) were designed against ssDNA 1 and synthesized with IDT. Assays were performed using the TaqMan Fast Advanced Master Mix (Thermo Fisher) and measured on a Roche LightCycler 480.

TABLE 15
qPCR primer/probe sequences.

| Name | Sequence |
|---|---|
| Forward Primer | GTG GAA TTG TGA GCG GAT AAA C |
| | (SEQ ID NO: 337) |
| Reverse Primer | AAC AGC AAT CTA CTC GAC CTG |
| | (SEQ ID NO: 338) |
| TaqMan Probe | /56-FAM/AGGAAACAG/ZEN/CTATGACCAT |
| | GATTACGCC/3IABkFQ/ (SEQ ID NO: 339) |

Real-Time RPA with SYBR Green II

[0643] To compare SHERLOCK quantification with other established methods, Applicant performed RPA on a dilution series of ssDNA 1. To quantitate accumulation of DNA in real-time, Applicant added 1×SYBR Green II (Thermo Fisher) to the typical RPA reaction mixture described above, which provides a fluorescent signal that correlates with the amount of nucleic acid. Reactions were allowed to proceed for 1 hr at 37° C. on a fluorescent plate reader (BioTek) with fluorescent kinetics measured every 5 min.

### Lentivirus Preparation and Processing

[0644] Lentivirus preparation and processing was based on the previously known methods. Briefly, 10 μg pSB700 derivatives that include a Zika or Dengue RNA fragment, 7.5 psPAX2, and 2.5 μg pMD2.G were transfected to HEK293FT cells (Life Technologies, R7007) using the HeBS-CaCl2 method. 28 hr after changing media, DMEM supplemented with 10% FBS, 1% penicillin-streptomycin and 4 mM GlutaMAX (ThermoFisher Scientific), the supernatant was filtered using a 0.45 μm syringe filter. ViralBind Lentivirus Purification Kit (Cell Biolabs, VPK-104) and Lenti-X Concentrator (Clontech, 631231) were used to purify and prepare lentiviruses from the supernatant. Viral concentration was quantified using QuickTiter Lentivirus Kit (Cell Biolabs, VPK-112). Viral samples were spiked into 7% human serum (Sigma, H4522), were heated to 95° C. for 2 min and were used as input to RPA.

Isolation and cDNA Purification of Zika Human Serum Samples

[0645] Suspected Zika positive human serum or urine samples were inactivated with AVL buffer (Qiagen) and isolation of RNA was achieved with QIAamp Viral RNA minikit (Qiagen). Isolated RNA was converted into cDNA by mixing random primers, dNTPs, and sample RNA followed by heat denaturation for 7 minutes at 70° C. Denatured RNA was then reverse transcribed with Superscript III (Invitrogen) incubating at 22-25° C. for 10 minutes, 50° C. for 45 minutes, 55° C. for 15 minutes, and 80° C. for 10 minutes. cDNA was then incubated for 20 minutes at 37° C. with RNAse H (New England Biolabs) to destroy RNA in the RNA:cDNA hybrids.

Genomic DNA Extraction from Human Saliva

[0646] 2 mL of saliva was collected from volunteers, who were restricted from consuming food or drink 30 minutes prior to collection. Samples were then processed using QIAamp® DNA Blood Mini Kit (Qiagen) as recommended by the kit protocol. For boiled saliva samples, 400 μL of phosphate buffered saline (Sigma) was added to 100 μL of volunteer saliva and centrifuged for 5 min at 1800 g. The supernatant was decanted and the pellet was resuspended in phosphate buffered saline with 0.2% Triton X-100 (Sigma) before incubation at 95° C. for 5 min. 1 μL of sample was used as direct input into RPA reactions.

### Freeze-Drying and Paper Deposition

[0647] A glass fiber filter paper (Whatman, 1827-021) was autoclaved for 90 min (Consolidated Stills and Sterilizers, MKII) and was blocked in 5% nuclease-free BSA (EMD Millipore, 126609-10GM) overnight. After rinsing the papers once with nuclease-free water (Life technologies, AM9932), they were incubated with 4% RNAsecure™ (Life technologies, AM7006) at 60° C. for 20 min and were rinsed three more times with the nuclease-free water. Treated papers were dried for 20 min at 80° C. on a hot plate (Cole-Parmer, IKA C-Mag HS7) prior to use. 1.8 μL of C2c2 reaction mixture as indicated earlier was put onto the disc (2 mm) that was placed in black, clear bottom 384-well plate (Corning, 3544). For the freeze-dried test, the plate containing reaction mixture discs was flash frozen in liquid nitrogen and was freeze-dried overnight as described in Pardee et al (2). RPA samples were diluted 1:10 in nuclease-free water, and 1.8 μL of the mixture was loaded onto the paper discs and incubated at 37° C. using a plate reader (BioTek Neo).

### Bacterial Genomic DNA Extraction

[0648] For experiments involving CRE detection, bacterial cultures were grown in lysogeny broth (LB) to mid-log phase, then pelleted and subjected to gDNA extraction and purification using the Qiagen DNeasy Blood and Tissue Kit, using the manufacturer's protocol for either Gram negative or Gram positive bacteria, as appropriate. gDNA was quantified by the Quant-It dsDNA assay on a Qubit fluorometer and its quality assessed via 200-300 nm absorbance spectrum on a Nanodrop spectrophotometer.

[0649] For experiments discriminating between E. coli and P. aeruginosa, bacterial cultures were grown to early stationary phase in Luria-Bertani (LB) broth. 1.0 mL of both E. coli and P. aeruginosa were processed using the portable PureLyse bacteria gDNA extraction kit (Claremont BioSolutions). 1× binding buffer was added to the bacterial culture before passing through the battery-powered lysis cartridge for three minutes. 0.5× binding buffer in water was used as a wash solution before eluting with 150 μL of water.

### Digital Droplet PCR Quantification

[0650] To confirm the concentration of ssDNA 1 and ssRNA 1 standard dilutions used in FIG. 1C, Applicant performed digital-droplet PCR (ddPCR). For DNA quantification, droplets were made using the ddPCR Supermix for Probes (no dUTP) with PrimeTime qPCR probes/primer assays designed to target the ssDNA 1 sequence. For RNA quantification, droplets were made using the one-step RT-ddPCR kit for probes with PrimeTime qPCR probes/primer assays designed to target the ssRNA 1 sequence. Droplets were generated in either case using the QX200 droplet generator (BioRad) and transferred to a PCR plate. Droplet-based amplification was performed on a thermocycler as described in the kit's protocol and nucleic acid concentrations were subsequently determined via measurement on a QX200 droplet reader.

### Synthetic Standards for Human Genotyping

[0651] To create standards for accurate calling of human sample genotypes, Applicant designed primers around the SNP target to amplify ˜200 bp regions from human genomic DNA representing each of the two homozygous genotypes. The heterozygous standard was then made by mixing the homozygous standards in a 1:1 ratio. These standards were then diluted to equivalent genome concentrations (˜0.56 fg/μL) and used as input for SHERLOCK alongside real human samples.

Detection of Tumor Mutant Cell Free-DNA (cfDNA)

[0652] Mock cfDNA standards simulating actual patient cfDNA samples were purchased from a commercial vendor (Horizon Discovery Group). These standards were provided as four allelic fractions (100% WT and 0.1%, 1%, and 5% mutant) for both the BRAF V600E and EGFR L858R mutants. 3 μL of these standards were provided as input to SHERLOCK.

### Analysis of Fluorescence Data

[0653] To calculate background subtracted fluorescence data, the initial fluorescence of samples was subtracted to allow for comparisons between different conditions. Fluorescence for background conditions (either no input or no crRNA conditions) were subtracted from samples to generate background subtracted fluorescence.

[0654] Guide ratios for SNP or strain discrimination were calculated by dividing each guide by the sum of guide values, to adjust for sample-to-sample overall variation. crRNA ratios for SNP or strain discrimination were calculated to adjust for sample-to-sample overall variation as follows:

$$crRNA {A}_{i} ratio = \frac{( m + n ) {A}_{i}}{{Σ}_{i = 1}^{m} {A}_{i} + {Σ}_{i = 1}^{n} {B}_{i}}$$

where Ai and Bi refer to the SHERLOCK intensity values for technical replicate i of the crRNAs sensing allele A or allele B, respectively, for a given individual. Since an assay typically has four technical replicates per crRNA, m and n are equal to 4 and the denominator is equivalent to the sum of all eight of the crRNA SHERLOCK intensity values for a given SNP locus and individual. Because there are two crRNAs, the crRNA ratio average across each of the crRNAs for an individual will always sum to two. Therefore, in the ideal case of homozygosity, the mean crRNA ratio for the positive allele crRNA will be two and the mean crRNA ratio for the negative allele crRNA will be zero. In the ideal case of heterozygosity, the mean crRNA ratio for each of the two crRNAs will be one.

### Characterization of LwCas13a Cleavage Requirements.

[0655] The protospacer flanking site (PFS) is a specific motif present near the target site that is required for robust ribonuclease activity by Cas13a. The PFS is located at the 3′ end of the target site and was previously characterized for LshCas13a by our group as H (not G) (1). Although this motif is akin to a protospacer adjacent motif (PAM), a sequence restriction for DNA targeting Class 2 systems, it is functionally different as it not involved in preventing self targeting of CRISPR loci in endogenous systems. Future structural studies of Cas13a will likely elucidate the importance of the PFS for Cas13a:crRNA target complex formation and cleavage activity.

[0656] Applicant purified the recombinant LwCas13a protein from E. coli (FIG. 2D-E) and assayed its ability to cleave a 173-nt ssRNA with each possible protospacer flanking site (PFS) nucleotide (A, U, C or G) (FIG. 2F). Similar to LshCas13a, LwCas13a can robustly cleave a target with A, U, or C PFS, with less activity on the ssRNA with a G PFS. Although weaker activity against ssRNA 1 with a G PFS was observed, Applicant still saw robust detection for the two target sites with G PFS motifs (Table 3; rs601338 crRNA and Zika targeting crRNA 2). It is likely that the H PFS is not required under every circumstance and that in many cases strong cleavage or collateral activity can be achieved with a G PFS.

### Discussion of Recombinase Polymerase Amplification (RPA) and Other Isothermal Amplification Strategies.

[0657] Recombinase polymerase amplification (RPA) is an isothermal amplification technique consisting of three essential enzymes: a recombinase, single-stranded DNA-binding proteins (SSBs), and a strand displacing polymerase. RPA overcomes many technical difficulties present in other amplification strategies, particularly polymerase chain reaction (PCR), by not requiring temperature regulation as the enzymes all operate at a constant temperature around 37° C. RPA replaces temperature cycling for global melting of the double-stranded template and primer annealing with an enzymatic approach inspired by in vivo DNA replication and repair. Recombinase-primer complexes scan double-stranded DNA and facilitate strand exchange at complementary sites. The strand exchange is stabilized by SSBs, allowing the primer to stay bound. Spontaneous disassembly of the recombinase occurs in its ADP-bound state, allowing a strand-displacing polymerase to invade and extend the primer, allowing amplification without complex instrumentation unavailable in point-of-care and field settings. Cyclic repetition of this process in a temperate range of 37-42° C. results in exponential DNA amplification. The original formulation published uses the Bacillus subtilis Pol I (Bsu) as the strand-displacing polymerase, T4 uvsX as the recombinase, and T4 gp32 as the single-stranded DNA binding protein (2), although it is unclear what components are in the current formulation sold by TwistDx used in this study.

[0658] Additionally, RPA has a number of limitations:

[0659] 1) Although Cas13a detection is quantitative (FIG. 15), real-time RPA quantitation can be difficult because of its rapid saturation when the recombinase uses all available ATP. While real-time PCR is quantitative because of the ability to cycle amplification, RPA has no mechanism to tightly control the rate of amplification. Certain adjustments can be made to reduce amplification speed, such as reducing available magnesium or primer concentrations, lowering the reaction temperature, or designing inefficient primers. Although some instances of quantitative SHERLOCK are observed, such as in FIGS. 31, 32, and 52, it is not always the case and may depend on the template.

[0660] 2) RPA efficiency can be sensitive to primer design. The manufacturer typically recommends designing longer primers to ensure efficient recombinase binding with average GC content (40-60%) and screening up to 100 primer pairs to find highly sensitive primer pairs. Applicant has found with SHERLOCK that only two primer pairs have to be designed to achieve an attomolar test with single molecule sensitivity. This robustness is likely due to the additional amplification of signal by constitutively active Cas13a collateral activity that offsets any inefficiencies in amplicon amplification. This quality is particularly important for our bacterial pathogen identification in FIG. 34. Issues were experienced with amplifying highly structured regions such as the 16S rRNA gene sites in bacterial genomes because there is no melting step involved in RPA. Thus, secondary structure in primers becomes an issue, limiting amplification efficiency and thus sensitivity. The embodiments disclosed herein were believed to be successful despite these RPA-specific issues because of additional signal amplification from Cas13 a.

[0661] 3) The amplification sequence length must be short (100-200 bp) for efficient RPA. For most applications, this is not a significant issue and perhaps is even advantageous (e.g. cfDNA detection where average fragment size is 160 bp). Sometimes large amplicon lengths are important, such as when universal primers are desired for bacterial detection and the SNPs for discrimination are spread over a large area.

[0662] SHERLOCK's modularity allows any amplification technique, even non-isothermal approaches, to be used prior to T7 transcription and Cas13a detection. This modularity is enabled by the compatibility of the T7 and Cas13a steps in a single reaction allowing detection to be performed on any amplified DNA input that has a T7 promoter. Prior to using RPA, nucleic acid sequence based amplification (NASBA) (3, 4) was attempted for our detection assay (FIG. 10). However NASBA did not drastically improve the sensitivity of Cas13a (FIGS. 11 and 53). Other amplification techniques that could be employed prior to detection include PCR, loop mediated isothermal amplification (LAMP) (5), strand displacement amplification (SDA) (6), helicase-dependent amplification (HDA) (7), and nicking enzyme amplification reaction (NEAR) (8). The ability to swap any isothermal technique allows SHERLOCK to overcome the specific limitations of any one amplification technique.

### Design of Engineered Mismatches.

[0663] Applicant demonstrates that LshCas13a target cleavage was reduced when there were two or more mismatches in the target:crRNA duplex but was relatively unaffected by single mismatches, an observation Applicant confirmed for LwCas13a collateral cleavage (FIG. 36A). Applicant hypothesized that by introducing an additional mutation in the crRNA spacer sequence, Applicant would destabilize collateral cleavage against a target with an additional mismatch (two mismatches in total) while retaining on-target collateral cleavage, as there would only be a single mismatch. To test the possibility of engineering increased specificity, Applicant designed multiple crRNAs targeting ssRNA 1 and included mismatches across the length of the crRNA (FIG. 36A) to optimize on-target collateral cleavage and minimize collateral cleavage of a target that differs by a single mismatch. Applicant observed that these mismatches did not reduce collateral cleavage of ssRNA 1, but significantly decreased signal for a target that included an additional mismatch (ssRNA 2). The designed crRNA that best distinguished between ssRNA 1 and 2 included synthetic mismatches close to the ssRNA 2 mismatch, in effect creating a “bubble,” or distortion in the hybridized RNA. The loss of sensitivity caused by the coordination of a synthetic mismatch and an additional mismatch present in the target (i.e., a double mismatch) agrees with the sensitivity of LshCas13a and LwCas13a to consecutive or nearby double mismatches and presents a basis for rational design of crRNAs that enable single-nucleotide distinction (FIG. 36B).

[0664] For mismatch detection of ZIKV and DENV strains, our full-length crRNA contained two mismatches (FIG. 37A, B). Due to high sequence divergence between strains, Applicant was unable to find a continuous stretch of 28 nt with only a single nucleotide difference between the two genomes. However, Applicant predicted that shorter crRNAs would still be functional, and designed shorter 23nt crRNAs against targets in the two ZIKV strains that included a synthetic mismatch in the spacer sequence and only one mismatch in the target sequence. These crRNAs could still distinguish African and American strains of ZIKV (FIG. 36C). Subsequent testing of 23 nt and 20 nt crRNA show that reductions of spacer length reduce activity but maintain or enhance the ability to discriminate single mismatches (FIG. 57A-G). To better understand how synthetic mismatches may be introduced to facilitate single-nucleotide mutation discrimination, Applicant tiled the synthetic mismatch across the first seven positions of the spacer at three different spacer lengths: 28, 23, and 20 nt (FIG. 57A). On a target with a mutation at the third position, LwCas13a shows maximal specificity when the synthetic mismatch is in position 5 of the spacer, with improved specificity at shorter spacer lengths, albeit with lower levels of on-target activity (FIG. 57B-G). Applicant also shifted the target mutation across positions 3-6 and tiled synthetic mismatches in the spacer around the mutation (FIG. 58).

Genotyping with SHERLOCK Using Synthetic Standards.

[0665] Evaluation of synthetic standards created from PCR amplification of the SNP loci allows for accurate identification of genotypes (FIG. 60A,B). By computing all comparisons (ANOVA) between the SHERLOCK results of an individual's sample and the synthetic standards, each individual's genotype can be identified by finding the synthetic standard that has the most similar SHERLOCK detection intensity (Gig. 60C, D). This SHERLOCK genotyping approach is generalizable to any SNP locus (FIG. 60E).

### SHERLOCK is an Affordable, Adaptable CRISPR-Dx Platform.

[0666] For the cost analysis of SHERLOCK, reagents determined to be of negligible cost were omitted, including DNA templates for the synthesis of crRNA, primers used in RPA, common buffers (MgCl2, Tris HCl, glycerol, NaCl, DTT), glass microfiber filter paper, and RNAsecure reagent. For DNA templates, ultramer synthesis from IDT provides material for 40 in vitro transcription reactions (each being enough for 10,000 reactions) for ˜$70, adding negligible cost to crRNA synthesis. For RPA primers, a 25 nmole IDT synthesis of a 30 nt DNA primer can be purchased for ˜$10, providing material adequate for 5000 SHERLOCK reactions. Glass microfiber paper is available for $0.50/sheet, which is sufficient for several hundred SHERLOCK reactions. 4% RNAsecure reagent costs $7.20/mL, which is sufficient for 500 tests.

[0667] In addition, for all experiments, except the paper-based assays, 384-well plates were used (Corning 3544), at the cost of $0.036/reaction. Because of the negligible cost, this was not included in the overall cost analysis. Additionally, SHERLOCK-POC does not require the use of a plastic vessel, as it can easily be performed on paper. The readout method for SHERLOCK used herein was a plate reader equipped with either a filter set or a monochromator. As a capital investment, the cost of the reader was not included in the calculation, as the cost precipitously decreases as more reactions are run on the instrument and is negligible. For POC applications, cheaper and portable alternatives could be used, such as hand-held spectrophotometers (9) or portable electronic readers (4), which reduce the cost of instrumentation to <$200. While these more portable solutions will reduce the speed and ease of readout as compared to bulkier instruments, they allow for more broad use.

### Results

[0668] The assay and systems described herein may generally comprise a two-step process of amplification and detection. During the first step, the nucleic acid sample, either RNA or DNA, is amplified, for example by isothermal amplification. During the second step, the amplified DNA is transcribed into RNA and subsequently incubated with a CRISPR effector, such as C2c2, and a crRNA programmed to detect the presence of the target nucleic acid sequence. To enable detection, a reporter RNA that has been labeled with a quenched fluorophore is added to the reaction. Collateral cleavage of the reporter RNA results in un-quenching of the fluorophore and allows for real-time detection of the nucleic acid target (FIG. 17A).

[0669] To achieve robust signal detection, an ortholog of C2c2 was identified from the organism Leptotrichia wadei (LwC2c2) and evaluated. The activity of the LwC2c2 protein was evaluated by expressing it along with a synthetic CRISPR array in E. coli and programming it to cleave a target site within the beta-lactamase mRNA, which leads to death of the bacteria under ampicillin selection (FIG. 2B). Fewer surviving E. coli colonies were observed with the LwC2c2 locus than with the LshC2c2 locus, demonstrating a higher cleavage activity of the LwC2c2 ortholog (FIG. 2C). The human-codon optimized LwC2c2 protein was then purified from E. coli (FIG. 2D-E) and its ability to cleave a 173-nt ssRNA assayed with different protospacer flanking site (PFS) nucleotides (FIG. 2F). LwC2c2 was able to cleave each of the possible four PFS targets, with slightly less activity on the ssRNA with a G PFS.

[0670] Real-time measurement of LwC2c2 RNase collateral activity was measured using a commercially available RNA fluorescent plate reader (FIG. 17A). To determine the baseline sensitivity of LwC2c2 activity, LwC2c2 was incubated with ssRNA target 1 (ssRNA 1) and a crRNA that is complementary to a site within the ssRNA target, along with the RNA sensor probe (FIG. 18). This yielded a sensitivity of ˜50 fM (FIG. 27A), which, although more sensitive than other recent nucleic acid detection technologies (Pardee et al., 2014), is not sensitive enough for many diagnostic applications which require sub-femtomolar detection performance (Barletta et al., 2004; Emmadi et al., 2011; Rissin et al., 2010; Song et al., 2013).

[0671] To increase sensitivity, an isothermal amplification step was added prior to incubation with LwC2c2. Coupling LwC2c2-mediated detection with previously used isothermal amplification approaches such as nucleic acid sequence based amplification (NASBA)(Compton, 1991; Pardee et al., 2016) improved sensitivity to a certain extent (FIG. 11). An alternative isothermal amplification approach, recombinase polymerase amplification (RPA) (Piepenburg et al., 2006), was tested which can be used to amplify DNA exponentially in under two hours. By adding a T7 RNA polymerase promoter onto the RPA primers, amplified DNA can be converted to RNA for subsequent detection by LwC2c2 (FIG. 17). Thus, in certain example embodiments, the assay comprises the combination of amplification by RPA, T7 RNA polymerase conversion of DNA to RNA, and subsequent detection of the RNA by C2c2 unlocking of fluorescence from a quenched reporter.

[0672] Using the example method on a synthesized DNA version of ssRNA 1, it was possible to achieve attomolar sensitivity in the range of 1-10 molecules per reaction (FIG. 27B, left). In order to verify the accuracy of detection, the concentration of input DNA was qualified with digital-droplet PCR and confirmed that the lowest detectable target concentration (2 aM) was at a concentration of a single molecule per microliter. With the addition of a reverse transcription step, RPA can also amplify RNA into a dsDNA form, allowing us attomolar sensitivity on ssRNA 1 to be achieved (27B, right). Similarly, the concentrations of RNA targets were confirmed by digital-droplet PCR. To evaluate the viability of the example method to function as a POC diagnostic test, the ability of all components—RPA, T7 polymerase amplification, and LwC2c2 detection—to function in a single reaction were tested and found attomolar sensitivity with a one-pot version of the assay (FIG. 22).

### The Assay is Capable of Sensitive Viral Detection in Liquid or on Paper

[0673] It was next determined whether the assay would be effective in infectious disease applications that require high sensitivity and could benefit from a portable diagnostic. To test detection in a model system, lentiviruses harboring RNA fragments of the Zika virus genome and the related flavivirus Dengue (Dejnirattisai et al., 2016) were produced and the number of viral particles quantified (FIG. 31A). Levels of mock virus were detected down to 2 aM. At the same time, it was also possible to show clear discrimination between these proxy viruses containing Zika and Dengue RNA fragments (FIG. 31B). To determine whether the assay would be compatible with freeze-drying to remove dependence on cold chains for distribution, the reaction components were freeze-dried. After using the sample to rehydrate the lyophilized components, 20 fM of ssRNA 1 was detected (FIG. 33A). Because resource-poor and POC settings would benefit from a paper test for ease of usability, the activity of C2c2 detection on glass fiber paper was also evaluated and found that a paper-spotted C2c2 reaction was capable of target detection (FIG. 33B). In combination, freeze-drying and paper-spotting the C2c2 detection reaction resulted in sensitive detection of ssRNA 1 (FIG. 33C). Similar levels of sensitivity were also observed for detection of a synthetic Zika viral RNA fragment between LwC2c2 in solution and freeze-dried LwC2c2, demonstrating the robustness of freeze-dried SHERLOCK and the potential for a rapid, POC Zika virus diagnostic (FIG. 33D-E). Toward this end, the ability of the POC variant of the assay was tested to determine the ability to discriminate Zika RNA from Dengue RNA (FIG. 31C). While paper-spotting and lyophilization slightly reduced the absolute signal of the readout, the assay still significantly detected mock Zika virus at concentrations as low as 20 aM (FIG. 31D), compared to detection of mock virus with the Dengue control sequence.

[0674] Zika viral RNA levels in humans have been reported to be as low as 3×106 copies/mL (4.9 fM) in patient saliva and 7.2×105 copies/mL (1.2 fM) in patient serum (Barzon et al., 2016; Gourinat et al., 2015; Lanciotti et al., 2008). From obtained patient samples, concentrations as low as 1.25×103 copies/mL (2.1 aM) were observed. To evaluate whether the assay is capable of Zika virus detection of low-titer clinical isolates, viral RNA was extracted from patients and reverse transcribed and the resulting cDNA was used as input for the assay (FIG. 32A). Significant detection for the Zika human serum samples was observed at concentrations down to 1.25 copy/uL (2.1 aM) (FIG. 32B). Furthermore, signal from patient samples was predictive of Zika viral RNA copy number and could be used to predict viral load (FIG. 31F). To test broad applicability for disease situations where nucleic acid purification is unavailable, detection of ssRNA 1 spiked into human serum was tested, and it was determined that the assay was activated at serum levels below 2% (FIG. 33G).

### Bacterial Pathogen Distinction and Gene Distinction

[0675] To determine if the assay could be used to distinguish bacterial pathogens, the 16S V3 region was selected as an initial target, as the conserved flanking regions allow universal RPA primers to be used across bacterial species, and the variable internal region allowing for differentiation of species. A panel of 5 possible targeting crRNAs were designed for pathogenic strains and isolated E. coli and Pseudomonas aeruginosa gDNA (FIG. 34A). The assay was capable of distinguishing E. coli or P. aeruginosa gDNA and showed low background signal for crRNAs of other species (FIG. 34 A, B).

[0676] The assay can also be adapted to rapidly detect and distinguish bacterial genes of interest, such as antibiotic-resistance genes. Carbapenem-resistant enterobacteria (CRE) are a significant emerging public health challenge (Gupta et al., 2011). The ability of the assay to detect carbapenem-resistance genes was evaluated, and if the test could distinguish between different carbapenem-resistance genes. Klebsiella pneumonia was obtained from clinical isolates harboring either Klebsiella pneumoniae carbapenemase (KPC) or New Delhi metallo-beta-lactamase 1 (NDM-1) resistance genes and designed crRNAs to distinguish between the genes. All CRE had significant signal over bacteria lacking these resistance genes (FIG. 35A) and that we could significantly distinguish between KPC and NDM-1 strains of resistance (FIG. 35B).

### Single-Base Mismatch Specificity of CRISPR RNA-Guided RNases

[0677] It has been shown that certain CRISPR RNA-guided RNase orthologues, such as LshC2c2, do not readily distinguish single-base mismatches. (Abudayyeh et al., 2016). As demonstrated herein, LwC2c2 also shares this feature (FIG. 37A). To increase the specificity of LwC2c2 cleavage, a system for introducing synthetic mismatches in the crRNA:target duplex was developed that increases the total sensitivity to mismatches and enables single-base mismatch sensitivity. Multiple crRNAs for target 1 were designed and included mismatches across the length of the crRNA (FIG. 37A) to optimize on-target cleavage and minimize cleavage of a target that differs by a single mismatch. These mismatches did not reduce cleavage efficiency of ssRNA target 1, but significantly decreased signal for a target that included an additional mismatch (ssRNA target 2). The designed crRNA that best distinguished between targets 1 and 2 included synthetic mismatches close to the target 2 mismatch, in effect creating a “bubble.” The loss of sensitivity caused by the coordination of a synthetic mismatch and an additional mismatch present in the target (i.e., a double mismatch) agrees with the sensitivity of LshC2c2 to consecutive or nearby double mismatches (Abudayyeh et al., 2016) and presents a format for rational design of crRNAs that enable single-nucleotide distinction (FIG. 37B).

[0678] Having demonstrated that C2c2 can be engineered to recognize single-base mismatches, it was determined whether this engineered specificity could be used to distinguish between closely related viral pathogens. Multiple crRNAs were designed to detect either the African or American strains of Zika virus (FIG. 37A) and either strain 1 or 3 of Dengue virus (FIG. 37C). These crRNAs included a synthetic mismatch in the spacer sequence, causing a single bubble to form when duplexed to the on-target strain due to the synthetic mismatch. However, when the synthetic mismatch spacer is duplexed to the off-target strain two bubbles form due to the synthetic mismatch and the SNP mismatch. The synthetic mismatch crRNAs detected their corresponding strains with significantly higher signal than the off-target strain allowing for robust strain distinction (FIG. 37B, 37D). Due to the significant sequence similarity between strains, it was not possible to find a continuous stretch of 28 nt with only a single nucleotide difference between the two genomes in order to demonstrate true single-nucleotide strain distinction. However, it was predicted that shorter crRNAs would still be functional, as they are with LshC2c2 (Abudayyeh et al., 2016), and accordingly shorter 23-nt crRNAs were designed against targets in the two Zika strains that included a synthetic mismatch in the spacer sequence and only one mismatch in the target sequence. These crRNAs were still capable of distinguishing the African and American strains of Zika with high sensitivity (FIG. 36C).

Rapid Genotyping Using DNA Purified from Saliva

[0679] Rapid genotyping from human saliva could be useful in emergency pharmacogenomic situations or for at-home diagnostics. To demonstrate the potential of the embodiments disclosed herein for genotyping, five loci were chosen to benchmark C2c2 detection using 23andMe genotyping data as the gold standard (Eriksson et al., 2010) (FIG. 38A). The five loci span a broad range of functional associations, including sensitivity to drugs, such as statins or acetaminophen, norovirus susceptibility, and risk of heart disease (Table 16).

TABLE 16
SNP Variants tested

| ID | Gene | Category |
|---|---|---|
| rs5082 | APOA2 | Saturated fat consumption and weight gain |
| rs1467558 | CD44 | Acetaminophen metabolism |
| rs2952768 | near CREB1 | morphine dependence |
| rs4363657 | SLCO1B1 | 4.5x increase myopathy risk for statin users |
| rs601338 | FUT2 | resistance to norovirus |

[0680] Saliva from four human subjects was collected and the genomic DNA purified using a simple commercial kit in less than an hour. The four subjects had a diverse set of genotypes across the five loci, providing a wide enough sample space for which to benchmark the assay for genotyping. For each of the five SNP loci, a subject's genomic DNA was amplified using RPA with the appropriate primers followed by detection with LwC2c2 and pairs of crRNAs designed to specifically detect one of the two possible alleles (FIG. 38B). The assay was specific enough to distinguish alleles with high significance and to infer both homozygous and heterozygous genotypes. Because a DNA extraction protocol was performed on the saliva prior to detection, the assay was tested to determine if it could be made even more amenable for POC genotyping by using saliva heated to 95° C. for 5 minutes without any further extraction. The assay was capable of correctly genotyping two patients whose saliva was only subjected to heating for 5 minutes and then subsequent amplification and C2c2 detection (FIG. 40B).

Detection of Cancerous Mutations in cfDNA at Low-Allelic Fractions

[0681] Because the assay is highly specific to single nucleotide differences in targets, a test was devised to determine if the assay was sensitive enough to detect cancer mutations in cell-free DNA (cfDNA). cfDNA fragments are small percentage (0.1% to 5%) of wild-type cfDNA fragments (Bettegowda et al., 2014; Newman et al., 2014; Olmedillas Lopez et al., 2016; Qin et al., 2016). A significant challenge in the cfDNA field is detecting these mutations because they are typically difficult to discover given the high levels of non-mutated DNA found in the background in blood (Bettegowda et al., 2014; Newman et al., 2014; Qin et al., 2016). A POC cfDNA cancer test would also be useful for regular screening of cancer presence, especially for patients at risk for remission.

[0682] The assay's ability to detect mutant DNA in wild-type background was determined by diluting dsDNA target 1 in a background of ssDNA1 with a single mutation in the crRNA target site (FIG. 41A-B). LwC2c2 was capable of sensing dsDNA 1 to levels as low as 0.1% of the background dsDNA and within attomolar concentrations of dsDNA 1. This result shows that LwC2c2 cleavage of background mutant dsDNA 1 is low enough to allow robust detection of the on-target dsDNA at 0.1% allelic fraction. At levels lower than 0.1%, background activity is likely an issue, preventing any further significant detection of the correct target.

[0683] Because the assay could sense synthetic targets with allelic fractions in a clinically relevant range, it was evaluated whether the assay was capable of detecting cancer mutations in cfDNA. RPA primers to two different cancer mutations, EGFR L858R and BRAF V600E, were designed and commercial cfDNA standards were used with allelic fractions of 5%, 1%, and 0.1% that resemble actual human cfDNA samples to test. Using a pair of crRNAs that could distinguish the mutant allele from the wild-type allele (FIG. 38C), detection of the 0.1% allelic fraction for both of the mutant loci was achieved (FIG. 39 A-B).

### Discussion

[0684] By combining the natural properties of C2c2 with isothermal amplification and a quenched fluorescent probe, the assay and systems disclosed herein have been demonstrated as a versatile, robust method to detect RNA and DNA, and suitable for a variety of rapid diagnoses including infectious disease applications and rapid genotyping. A major advantage of the assays and systems disclosed herein is that a new POC test can be redesigned and synthesized in a matter of days for as low as $0.6/test.

[0685] Because many human disease applications require the ability to detect single mismatches a rational approach was developed to engineer crRNAs to be highly specific to a single mismatch in the target sequence by introducing a synthetic mismatch in the spacer sequence of the crRNA. Other approaches for achieving specificity with CRISPR effectors rely on screening-based methods over dozens of guide designs (Chavez et al., 2016). Using designed mismatch crRNAs, discrimination of Zika and Dengue viral strains in sites that differ by a single mismatch, rapid genotyping of SNPs from human saliva gDNA, and detection of cancer mutations in cfDNA samples, was demonstrated.

[0686] The low cost and adaptability of the assay platform lends itself to further applications including (i) general RNA/DNA quantitation experience in substitute of specific qPCR assays, such as Taqman, (ii) rapid, multiplexed RNA expression detection resembling microarrays, and (iii) other sensitive detection applications, such as detection of nucleic acid contamination from other sources in food. Additionally, C2c2 could potentially be used for detection of transcripts within biological settings, such as in cells, and given the highly specific nature of C2c2 detection, it may be possible to track allelic specific expression of transcripts or disease-associated mutations in live cells. With the wide availability of aptamers, it might also be possible to sense proteins by coupling the detection of protein by an aptamer to the revealing of a cryptic amplification site for RPA followed by C2c2 detection.

Nucleic Acid Detection with CRISPR-Cas13a/C2c2: Attomolar Sensitivity and Single Nucleotide Specificity

[0687] To achieve robust signal detection, Applicant identified an ortholog of Cas13a from Leptotrichia wadei (LwCas13a), which displays greater RNA-guided RNase activity relative to Leptotrichia shahii Cas13a (LshCas13a) (10) (FIG. 2, see also above “Characterization of LwCas13a cleavage requirements”). LwCas13a incubated with ssRNA target 1 (ssRNA 1), crRNA, and reporter (quenched fluorescent RNA) (FIG. 18) (13) yielded a detection sensitivity of ˜50 fM (FIG. 51, 15), which is not sensitive enough for many diagnostic applications (12, 14-16). Applicant therefore explored combining Cas13a-based detection with different isothermal amplification steps (FIG. 10, 11, 53, 16) (17, 18). Of the methods explored, recombinase polymerase amplification (RPA) (18) afforded the greatest sensitivity and can be coupled with T7 transcription to convert amplified DNA to RNA for subsequent detection by LwCas13a (see also above “Discussion of Recombinase Polymerase Amplification (RPA) and other isothermal amplification strategies.”). Applicant refer to this combination of amplification by RPA, T7 RNA polymerase transcription of amplified DNA to RNA, and detection of target RNA by Cas collateral RNA cleavage-mediated release of reporter signal as SHERLOCK.

[0688] Applicant first determined the sensitivity of SHERLOCK for detection of RNA (when coupled with reverse transcription) or DNA targets. Applicant achieved single molecule sensitivity for both RNA and DNA, as verified by digital-droplet PCR (ddPCR) (FIG. 27, 51, 54A, B). Attomolar sensitivity was maintained when all SHERLOCK components were combined in a single reaction, demonstrating the viability of this platform as a point-of-care (POC) diagnostic (FIG. 54C). SHERLOCK has similar levels of sensitivity as ddPCR and quantitative PCR (qPCR), two established sensitive nucleic acid detection approaches, whereas RPA alone was not sensitive enough to detect low levels of target (FIG. 55A-D). Moreover, SHERLOCK shows less variation than ddPCR, qPCR, and RPA, as measured by the coefficient of variation across replicates (FIG. 55E-F).

[0689] Applicant next examined whether SHERLOCK would be effective in infectious disease applications that require high sensitivity. Applicant produced lentiviruses harboring genome fragments of either Zika virus (ZIKV) or the related flavivirus Dengue (DENV) (19) (FIG. 31A). SHERLOCK detected viral particles down to 2 aM and could discriminate between ZIKV and DENV (FIG. 31B). To explore the potential use of SHERLOCK in the field, Applicant first demonstrated that Cas13acrRNA complexes lyophilized and subsequently rehydrated (20) could detect 20 fM of nonamplified ssRNA 1 (FIG. 33A) and that target detection was also possible on glass fiber paper (FIG. 33B). The other components of SHERLOCK are also amenable to freeze-drying: RPA is provided as a lyophilized reagent at ambient temperature, and Applicant previously demonstrated that T7 polymerase tolerates freeze-drying (2). In combination, freeze-drying and paper-spotting the Cas13a detection reaction resulted in comparable levels of sensitive detection of ssRNA 1 as aqueous reactions (FIG. 33C-E). Although paper-spotting and lyophilization slightly reduced the absolute signal of the readout, SHERLOCK (FIG. 31C) could readily detect mock ZIKV virus at concentrations as low as 20 aM (FIG. 31D). SHERLOCK is also able to detect ZIKV in clinical isolates (serum, urine, or saliva) where titers can be as low as 2×103 copies/mL (3.2 aM) (21). ZIKV RNA extracted from patient serum or urine samples and reverse transcribed into cDNA (FIGS. 32E and 52A) could be detected at concentrations down to 1.25×103 copies/mL (2.1 aM), as verified by qPCR (FIGS. 32F and 52B). Furthermore, the signal from patient samples was predictive of ZIKV RNA copy number and could be used to predict viral load (FIG. 33F). To simulate sample detection without nucleic acid purification, Applicant measured detection of ssRNA 1 spiked into human serum, and found that Cas13a could detect RNA in reactions containing as much as 2% serum (FIG. 33G). Another important epidemiological application for the embodiments disclosed herein is the identification of bacterial pathogens and detection of specific bacterial genes. Applicant targeted the 16S rRNA gene V3 region, where conserved flanking regions allow universal RPA primers to be used across bacterial species and the variable internal region allows for differentiation of species. In a panel of five possible targeting crRNAs for different pathogenic strains and gDNA isolated from E. coli and Pseudomonas aeruginosa (FIG. 34A), SHERLOCK correctly genotyped strains and showed low cross-reactivity (FIG. 34B). Additionally, Applicant was able to use SHERLOCK to distinguish between clinical isolates of Klebsiella pneumoniae with two different resistance genes: Klebsiella pneumoniae carbapenemase (KPC) and New Delhi metallo-beta-lactamase 1 (NDM-1) (22) (FIG. 56).

[0690] To increase the specificity of SHERLOCK, Applicant introduced synthetic mismatches in the crRNA:target duplex that enable LwCas13a to discriminate between targets that differ by a single-base mismatch (FIG. 36A,B; see also above “Design of Engineered Mismatches”). Applicant designed multiple crRNAs with synthetic mismatches in the spacer sequences to detect either the African or American strains of ZIKV (FIG. 37A) and strain 1 or 3 of DENV (FIG. 37C). Synthetic mismatch crRNAs detected their corresponding strains with significantly higher signal (two-tailed Student t-test; p<0.01) than the off-target strain, allowing for robust strain discrimination based off single mismatches (FIG. 37B, D, 36C). Further characterization revealed that Cas13a detection achieves maximal specificity while maintaining on-target sensitivity when a mutation is in position 3 of the spacer and the synthetic mismatch is in position 5 (FIGS. 57 and 58). The ability to detect single-base differences opens the opportunity of using SHERLOCK for rapid human genotyping. Applicant chose five loci spanning a range of health-related single-nucleotide polymorphisms (SNPs) (Table 1) and benchmarked SHERLOCK detection using 23andMe genotyping data as the gold standard at these SNPs (23) (FIG. 38A). Applicant collected saliva from four human subjects with diverse genotypes across the loci of interest, and extracted genomic DNA either through commercial column purification or direct heating for five minutes (20). SHERLOCK distinguished alleles with high significance and with enough specificity to infer both homozygous and heterozygous genotypes (FIG. 38B, 40, 59, 60; see also above “Genotyping with SHERLOCK using synthetic standards”). Finally, Applicant sought to determine if SHERLOCK could detect low frequency cancer mutations in cell free (cf) DNA fragments, which is challenging because of the high levels of wild-type DNA in patient blood (24-26). Applicant first found that SHERLOCK could detect ssDNA 1 at attomolar concentrations diluted in a background of genomic DNA (FIG. 61). Next, Applicant found that SHERLOCK was also able to detect single nucleotide polymorphism (SNP)-containing alleles (FIG. 41A, B) at levels as low as 0.1% of background DNA, which is in the clinically relevant range. Applicant then demonstrated that SHERLOCK could detect two different cancer mutations, EGFR L858R and BRAF V600E, in mock cfDNA samples with allelic fractions as low as 0.1% (FIG. 38,39) (20).

[0691] The SHERLOCK platform lends itself to further applications including (i) general RNA/DNA quantitation in lieu of specific qPCR assays, such as TaqMan, (ii) rapid, multiplexed RNA expression detection, and (iii) other sensitive detection applications, such as detection of nucleic acid contamination. Additionally, Cas13a could potentially detect transcripts within biological settings and track allele-specific expression of transcripts or disease-associated mutations in live cells. SHERLOCK is a versatile, robust method to detect RNA and DNA, suitable for rapid diagnoses including infectious disease applications and sensitive genotyping. A SHERLOCK paper test can be redesigned and synthesized in a matter of days for as low as $0.61/test (see also above “SHERLOCK is an affordable, adaptable CRISPR-Dx platform”) with confidence, as almost every crRNA tested resulted in high sensitivity and specificity. These qualities highlight the power of CRISPR-Dx and open new avenues for rapid, robust and sensitive detection of biological molecules.

TABLE 17
RPA Primers used

| Name | Sequence | 1st FIG. |
|---|---|---|
| RP0683 - RPA ssDNA/ssRNA 1 F | (SEQ ID NO: 340) | FIG. 27B |
| RP0684 - RPA ssDNA/ssRNA 1 R | (SEQ ID NO: 341) | FIG. 27B |
| AMPL-25 Zika 8B long-rpa3-f | (SEQ ID NO: 342) | FIG. 31B |
| AMPL-26 Zika 8B long-rpa3-r | (SEQ ID NO: 343) | FIG. 31B |
| RP819 - zika region 8 F | (SEQ ID NO: 344) | FIG. 31C |
| RP821 - zika region 8 R | (SEQ ID NO: 345) | FIG. 31C |
| 517 bacterial V3 F | (SEQ ID NO: 346) | FIG. 34B |
| RP758 bacterial V3 R | (SEQ ID NO: 347) | FIG. 34B |
| wR0074 A2 rs5082 F | (SEQ ID NO: 348) | FIG. 38B |
| wR0074 E2 rs5082 R | (SEQ ID NO: 349) | FIG. 38B |
| wR0074 A4 rs1467558 F | (SEQ ID NO: 350) | FIG. 38B |
| wR0074 E4 rs1467558 R | (SEQ ID NO: 351) | FIG. 38B |
| wR0074 A5 rs2952768 F | (SEQ ID NO: 352) | FIG. 38B |
| wR0074 E5 rs2952768 R | (SEQ ID NO: 353) | FIG. 38B |
| wR0074 A9 rs4363657 F | (SEQ ID NO: 354) | FIG. 38B |
| wR0074 E9 rs4363657 R | (SEQ ID NO: 355) | FIG. 38B |
| wR0074 A11 rs601338 F | (SEQ ID NO: 356) | FIG. 38B |
| wR0074 E11 rs601338 R | (SEQ ID NO: 357) | FIG. 38B |
| RP824 BRAFV600E cfDNA F | (SEQ ID NO: 358) | FIG. 39A |
| RP769 BRAFV600E cfDNA R | (SEQ ID NO: 359) | FIG. 39A |
| RP826 EGFR858R cfDNA F | (SEQ ID NO: 360) | FIG. 39B |
| RP804 EGFR858R cfDNA R | (SEQ ID NO: 361) | FIG. 39B |
| AMPL-31 T1-nasba1-f | (SEQ ID NO: 362) | FIG. 11 |
| AMPL-32 T1-nasba1-r | (SEQ ID NO: 363) | FIG. 11 |
| AMPL-33 T1-nasba2-f | (SEQ ID NO: 364) | FIG. 11 |
| AMPL-34 T1-nasba2-r | (SEQ ID NO: 365) | FIG. 11 |
| AMPL-35 T1-nasba3-f | (SEQ ID NO: 366) | FIG. 11 |
| AMPL-36 T1-nasba3-r | (SEQ ID NO: 367) | FIG. 11 |
| wR0075 A1 KPC F | (SEQ ID NO: 368) | FIG. 35A |
| wR0075 B1 KPC R | (SEQ ID NO: 369) | FIG. 35A |
| wR0075 A3 NDM F | (SEQ ID NO: 370) | FIG. 35A |
| wR0075 B3 NDM R | (SEQID NO: 371) | FIG. 35A |

TABLE 18
crRNA sequences used

| | Complete crRNA | | | |
|---|---|---|---|---|
| Name | sequence | Spacer sequence | 1st FIG. | PFS |
| Target 1 crRNA | (SEQ ID NO: 372) | (SEQ ID NO: 373) | FIG. 2F | C |
| Zika targeting | (SEQ ID NO: 374) | (SEQ ID NO: 375) | FIG. 31A | U |
| crRNA 1 | | | | |
| Zika targeting | (SEQ ID NO: 376) | (SEQ ID NO: 377) | FIG. 33D | G |
| crRNA 2 | | | | |
| E. coli detection | (SEQ ID NO: 378) | (SEQ ID NO: 379) | FIG. 22B | U |
| crRNA | | | | |
| K. pneumoniae | (SEQ ID NO: 380) | (SEQ ID NO: 381) | FIG. 34B | U |
| detection crRNA | | | | |
| P. aeruginosa | (SEQ ID NO: 382) | (SEQ ID NO: 383) | FIG. 34B | U |
| detection crRNA | | | | |
| M. tuberculosis | (SEQ ID NO: 384) | (SEQ ID NO: 385) | FIG. 34B | U |
| detection crRNA | | | | |
| S. aureus detection | (SEQ ID NO: 386) | (SEQ ID NO: 387) | FIG. 34B | G |
| crRNA | | | | |
| KPC crRNA | (SEQ ID NO: 388) | (SEQ ID NO: 389) | FIG. 35A | U |
| NDM crRNA | (SEQ ID NO: 390) | (SEQ ID NO: 391) | FIG. 35A | C |
| mismatch crRNA 1 | (SEQ ID NO: 392) | (SEQ ID NO: 393) | FIG. 36A | C |
| mismatch crRNA 2 | (SEQ ID NO: 394) | (SEQ ID NO: 395) | FIG. 36A | C |
| mismatch crRNA 3 | (SEQ ID NO: 396) | (SEQ ID NO: 397) | FIG. 36A | C |
| mismatch crRNA 4 | (SEQ ID NO: 398) | (SEQ ID NO: 399) | FIG. 36A | C |
| mismatch crRNA 5 | (SEQ ID NO: 400) | (SEQ ID NO: 401) | FIG. 36A | C |
| mismatch crRNA 6 | (SEQ ID NO: 402) | (SEQ ID NO: 403) | FIG. 36A | C |
| mismatch crRNA 7 | (SEQ ID NO: 404) | (SEQ ID NO: 405) | FIG. 36A | C |
| mismatch crRNA 8 | (SEQ ID NO: 406) | (SEQ ID NO: 407) | FIG. 36A | C |
| mismatch crRNA 9 | (SEQ ID NO: 408) | (SEQ ID NO: 409) | FIG. 36A | C |
| mismatch crRNA 10 | (SEQ ID NO: 410) | (SEQ ID NO: 411) | FIG. 36A | C |
| African crRNA 1 | (SEQ ID NO: 412) | (SEQ ID NO: 413) | FIG. 38A | C |
| African crRNA 2 | (SEQ ID NO: 414) | (SEQ ID NO: 415) | FIG. 38A | C |
| American crRNA 1 | (SEQ ID NO: 416) | (SEQ ID NO: 417) | FIG. 38A | U |
| American crRNA 2 | (SEQ ID NO: 418) | (SEQ ID NO: 419) | FIG. 38A | U |
| Dengue strain 3 | (SEQ ID NO: 420) | (SEQ ID NO: 421) | FIG. 38C | A |
| crRNA 1 | | | | |
| Dengue strain 3 | (SEQ ID NO: 422) | (SEQ ID NO: 423) | FIG. 38C | A |
| crRNA 2 | | | | |
| Dengue strain 1 | (SEQ ID NO: 424) | (SEQ ID NO: 425) | FIG. 38C | A |
| crRNA 1 | | | | |
| Dengue strain 1 | (SEQ ID NO: 426) | (SEQ ID NO: 427) | FIG. 38C | A |
| crRNA 2 | | | | |
| Shorter African | (SEQ ID NO: 428) | (SEQ ID NO: 429) | FIG. 36C | C |
| crRNA 1 | | | | |
| Shorter African | (SEQ ID NO: 430) | (SEQ ID NO: 431) | FIG. 36C | C |
| crRNA 2 | | | | |
| Shorter American | (SEQ ID NO: 432) | (SEQ ID NO: 433) | FIG. 36C | U |
| crRNA 1 | | | | |
| Shorter American | (SEQ ID NO: 434) | (SEQ ID NO: 435) | FIG. 36C | U |
| crRNA 2 | | | | |
| rs1467558 | (SEQ ID NO: 436) | (SEQ ID NO: 437) | FIG. 38B | C |
| crRNA C | | | | |
| rs1467558 | (SEQ ID NO: 438) | (SEQ ID NO: 439) | FIG. 38B | C |
| crRNA T | | | | |
| rs2952768 | (SEQ ID NO: 440) | (SEQ ID NO: 441) | FIG. 38B | A |
| crRNA C | | | | |
| rs2952768 | (SEQ ID NO: 442) | (SEQ ID NO: 443) | FIG. 38B | A |
| crRNA T | | | | |
| rs4363657 | (SEQ ID NO: 444) | (SEQ ID NO: 445) | FIG. 38B | A |
| crRNA C | | | | |
| rs4363657 | (SEQ ID NO: 446) | (SEQ ID NO: 447) | FIG. 38B | A |
| crRNA T | | | | |
| rs601338 | (SEQ ID NO: 448) | (SEQ ID NO: 449) | FIG. 38B | G |
| crRNA A | | | | |
| rs601338 | (SEQ ID NO: 450) | (SEQ ID NO: 451) | FIG. 38B | G |
| crRNA G | | | | |
| rs5082 | (SEQ ID NO: 452) | (SEQ ID NO: 453) | FIG. 40A | A |
| crRNA G | | | | |
| rs5082 | (SEQ ID NO: 454) | | | A |
| crRNA A | | | | |
| EGFR L858R | (SEQ ID NO: 455) | (SEQ ID NO: 456) | FIG. 38C | C |
| wild-type | | | | |
| crRNA | | | | |
| EGFR L858R | (SEQ ID NO: 457) | (SEQ ID NO: 458) | FIG. 38C | C |
| mutant | | | | |
| crRNA | | | | |
| BRAF V600E | (SEQ ID NO: 459) | (SEQ ID NO: 460) | FIG. 38C | A |
| wild-type | | | | |
| crRNA | | | | |
| BRAF V600E | (SEQ ID NO: 461) | (SEQ ID NO: 462) | FIG. 38C | A |
| mutant | | | | |
| crRNA | | | | |
| 23 nt mismatch | (SEQ ID NO: 463) | (SEQ ID NO: 464) | FIG. 57D | C |
| crRNA 1 | | | | |
| 23 nt mismatch | (SEQ ID NO: 465) | (SEQ ID NO: 466) | FIG. 57D | C |
| crRNA 2 | | | | |
| 23 nt mismatch | (SEQ ID NO: 467) | (SEQ ID NO: 468) | FIG. 57D | C |
| crRNA 4 | | | | |
| 23 nt mismatch | (SEQ ID NO: 469) | (SEQ ID NO: 470) | FIG. 57D | C |
| crRNA 5 | | | | |
| 23 nt mismatch | (SEQ ID NO: 471) | (SEQ ID NO: 472) | FIG. 57D | C |
| crRNA 6 | | | | |
| 23 nt mismatch | (SEQ ID NO: 473) | (SEQ ID NO: 474) | FIG. 57D | C |
| crRNA 7 | | | | |
| 20 nt mismatch | (SEQ ID NO: 475) | (SEQ ID NO: 476) | FIG. 57F | C |
| crRNA 1 | | | | |
| 20 nt mismatch | (SEQ ID NO: 477) | (SEQ ID NO: 478) | FIG. 57F | C |
| crRNA 2 | | | | |
| 20 nt mismatch | (SEQ ID NO: 479) | (SEQ ID NO: 480) | FIG. 57F | C |
| crRNA 4 | | | | |
| 20 nt mismatch | (SEQ ID NO: 481) | (SEQ ID NO: 482) | FIG. 57F | C |
| crRNA 5 | | | | |
| 20 nt mismatch | (SEQ ID NO: 483) | (SEQ ID NO: 484) | FIG. 57F | C |
| crRNA 6 | | | | |
| 20 nt mismatch | (SEQ ID NO: 485) | (SEQ ID NO: 486) | FIG. 57F | C |
| crRNA 7 | | | | |
| target mismatch | (SEQ ID NO: 487) | (SEQ ID NO: 488) | FIG. 58B | C |
| 4 mismatch | | | | |
| crRNA 1 | | | | |
| target mismatch | (SEQ ID NO: 489) | (SEQ ID NO: 490) | FIG. 58B | C |
| 4 mismatch | | | | |
| crRNA 2 | | | | |
| target mismatch | (SEQ ID NO: 491) | (SEQ ID NO: 492) | FIG. 58B | C |
| 4 mismatch | | | | |
| crRNA 3 | | | | |
| target mismatch | (SEQ ID NO: 493) | (SEQ ID NO: 494) | FIG. 58B | C |
| 4 mismatch | | | | |
| crRNA 5 | | | | |
| target mismatch | (SEQ ID NO: 495) | (SEQ ID NO: 496) | FIG. 58B | C |
| 4 mismatch | | | | |
| crRNA 6 | | | | |
| target mismatch | (SEQ ID NO: 497) | (SEQ ID NO: 498) | FIG. 58B | C |
| 4 mismatch | | | | |
| crRNA 7 | | | | |
| target mismatch | (SEQ ID NO: 499) | (SEQ ID NO: 500) | FIG. 58B | C |
| 5 mismatch | | | | |
| crRNA 2 | | | | |
| target mismatch | (SEQ ID NO: 501) | (SEQ ID NO: 502) | FIG. 58B | C |
| 5 mismatch | | | | |
| crRNA 3 | | | | |
| target mismatch | (SEQ ID NO: 503) | (SEQ ID NO: 504) | FIG. 58B | C |
| 5 mismatch | | | | |
| crRNA 4 | | | | |
| target mismatch | (SEQ ID NO: 505) | (SEQ ID NO: 506) | FIG. 58B | C |
| 5 mismatch | | | | |
| crRNA 6 | | | | |
| target mismatch | (SEQ ID NO: 507) | (SEQ ID NO: 508) | FIG. 58B | C |
| 5 mismatch | | | | |
| crRNA 7 | | | | |
| target mismatch | (SEQ ID NO: 509) | (SEQ ID NO: 510) | FIG. 58B | C |
| 5 mismatch | | | | |
| crRNA 8 | | | | |
| target mismatch | (SEQ ID NO: 511) | (SEQ ID NO: 512) | FIG. 58B | C |
| 6 mismatch | | | | |
| crRNA 3 | | | | |
| target mismatch | (SEQ ID NO: 513) | (SEQ ID NO: 514) | FIG. 58B | C |
| 6 mismatch | | | | |
| crRNA 4 | | | | |
| target mismatch | (SEQ ID NO: 515) | (SEQ ID NO: 516) | FIG. 58B | C |
| 6 mismatch | | | | |
| crRNA 5 | | | | |
| target mismatch | (SEQ ID NO: 517) | (SEQ ID NO: 518) | FIG. 58B | C |
| 6 mismatch | | | | |
| crRNA 7 | | | | |
| target mismatch | (SEQ ID NO: 519) | (SEQ ID NO: 520) | FIG. 58B | C |
| 6 mismatch | | | | |
| crRNA 8 | | | | |
| target mismatch | (SEQ ID NO: 521) | (SEQ ID NO: 522) | FIG. 58B | C |
| 6 mismatch | | | | |
| crRNA 9 | | | | |

TABLE 19
RNA and DNA targets used in this Example

| Name | Sequence | 1^{st} FIG. |
|---|---|---|
| ssRNA 1 (C PFS) | (SEQ ID NO: 523) | FIG. 2F |
| ssRNA 1 (G PFS) | (SEQ ID NO: 524) | FIG. 2F |
| ssRNA 1 (A PFS) | (SEQ ID NO: 525) | FIG. 2F |
| ssRNA 1 (U PFS) | (SEQ ID NO: 526) | FIG. 2F |
| ssDNA 1 | (SEQ ID NO: 527) | FIG. 27 |
| DNA 2 | (SEQ ID NO: 528) | FIG. 54B |
| ZIKV in lentivirus | (SEQ ID NO: 529) | FIG. 31B |
| DENV in lentivirus | (SEQ ID NO: 530) | FIG. 31B |
| Synthetic ZIKV | (SEQ ID NO: 531) | FIG. 33D |
| target | | |
| Synthetic African | (SEQ ID NO: 532) | FIG. 37A |
| ZIKV target | | |
| Synthetic American | (SEQ ID NO: 533) | FIG. 37A |
| ZIKV target | | |
| Synthetic Dengue | (SEQ ID NO: 534) | FIG. 37C |
| strain 1 target | | |
| Synthetic Dengue | (SEQ ID NO: 535) | FIG. 37C |
| strain 3 target | | |
| ssRNA 2 | (SEQ ID NO: 536) | FIG. 36A |
| ssRNA 3 | (SEQ ID NO: 537) | FIG. 36A |

TABLE 20
plasmids used in this Example

| Plasmid Name | Description | Link to plasmid map |
|---|---|---|
| pC004 | beta-lactamase screening target | https://benchling.com/s/lPJ1cCwR |
| pC009 | LshCas13a locus into pACYC184 | https://benchling.com/s/ |
| | with targeting spacer | seqylkMuglYmiG4A3VhShZg |
| pC010 | LshCas13a locus into pACYC184 | https://benchling.com/s/seq- |
| | with nontargeting spacer | 2WApFr3zni1GOACyQY8a |
| pC011 | LwCas13a locus into pACYC184 | https://benchling.com/s/seq- |
| | with targeting spacer | Vyk8qK2fyhzegfNgLJHM |
| pC012 | LwCas13a locus into pACYC184 | https://benchling.com/s/seq- |
| | with nontargeting spacer | RxZAgPBzBUGQThkxR2Kx |
| pC013 | Twinstrep-SUMO-huLwCas13a for | https://benchling.com/s/seq- |
| | bacterial expression | 66CfLwu7sLMQMbcXe7Ih |

### Example 3—Characterization of Cas13b Orthologs with Orthogonal Base Preferences

[0692] Applicant biochemically characterized fourteen orthologs of the recently defined type VI CRISPR-Cas13b family of RNA-guided RNA-targeting enzymes to find new candidates for improving the SHERLOCK detection technology (FIGS. 83A and 85). Applicant was able to heterologously express fourteen Cas13b orthologs in E. coli and purify the proteins for an in vitro RNase activity assay (FIG. 86). Because different Cas13 orthologs might have varying base preferences for optimal cleavage activity, Applicant generated fluorescent RNase homopolymer sensors that consisted of either 5 As, Gs, Cs, or Us to evaluate orthogonal cleavage preferences. Applicant incubated each ortholog with its cognate crRNA targeting a synthetic 173nt ssRNA 1 and measured collateral cleavage activity using the homopolymer fluorescent sensors (FIGS. 83B and 87).

### Example 4—Motif Discovery Screen with Library

[0693] To further explore the diversity of cleavage preferences of the various Cas13a and Cas13b orthologs, Applicant developed a library-based approach for characterizing motifs preferred for endonuclease activity in response to collateral activity. Applicant used a degenerate 6-mer RNA reporter flanked by constant DNA handles, which allowed for amplification and readout of uncleaved sequences (FIG. 83C). Incubating this library with collateral activated Cas13 enzymes resulted in detectable cleavage and depended on the addition of target RNA (FIG. 88). Sequencing of depleted motifs revealed an increase in the skew of the library over digestion time (FIG. 89A), indicative of base-preference, and selecting sequences above a threshold ratio produced number enriched sequences that corresponded with cleavage of the enzymes (FIG. 89B). Sequence logos from enriched motifs reproduced the U-preference observed for LwaCas13a and CcaCas13b and the A-preference of PsmCas13b (FIG. 89C). Applicant also determined multiple sequences that showed cleavage for only one ortholog, but not others, to allow for independent readout (FIG. 89D).To understand the specific sub-motifs of enzyme preference, Applicant analyzed the depleted motifs for single-base preferences (FIG. 90A), which agreed with homopolymer motifs tested as well as for two-base motifs (FIGS. 83C and 90B). These two base motifs reveal a more complex preference, especially for LwaCas13a and PsmCas13b, which prefers TA, GA, and AT dibase sequences. Higher order motifs also revealed additional preferences (FIGS. 91 and 92).

[0694] Applicant confirmed the collateral preferences of LwaCas13a, PsmCas13b, and CcaCas13b with in vitro digestion of targets (FIG. 93). In order to improve the weak digestion of PsmCas13b, Applicant optimized the buffer composition and enzyme concentration (FIG. 94A, B). Other dications tested on PsmCas13b and Cas13b orthologs did not have large effects (FIG. 95A-F). Applicant also compared PsmCas13b to a previously characterized A-preference Cas13 family member for two RNA targets, and found comparable or improved sensitivity (FIG. 96A, B). From these results, Applicant compared kinetics of LwaCas13a and PsmCas13b, in separate reactions with independent reporters, and found low levels of cross-talk between the two channels (FIG. 83D).

### Example 5—Single Molecule Detection with LwaCas13a, PsmCas13b, and CcaCas13b

[0695] A key feature of the SHERLOCK technology is that it enables single molecule detection (2 aM or 1 molecule/μL) by LwaCas13a collateral RNase activity. To characterize the sensitivity of Cas13b enzymes, Applicant performed SHERLOCK with PsmCas13b and CcaCas13b, another highly active Cas13b enzyme with uridine preference (FIG. 83E). Applicant found that LwaCas13a, PsmCas13b, and CcaCas13b were capable of achieving 2 aM detection of two different RNA targets, ssRNA 1 and a synthetic Zika ssRNA (FIGS. 83E; 97, and 98). To investigate the robustness of targeting with these three enzymes, Applicant designed eleven different crRNAs evenly spaced across ssRNA 1 and found that LwaCas13a most consistently achieved signal detection, while CcaCas13b and Psmcas13b both showed much more variability in detection from crRNA to crRNA (FIG. 99). To identify the optimal crRNA for detection, Applicant varied the spacer length of PsmCas13b and CcaCas13b from 34-12 nt and found that PsmCas13b had a peak sensitivity at a spacer length of 30 while CcaCas13b had equivalent sensitivity above spacer lengths of 28nt (FIG. 100). Applicant also tested if the detection limit could be pushed beyond 2 aM, allowing for larger sample volume inputs into SHERLOCK. By scaling up the pre-amplification RPA step, Applicant found that both LwaCas13a and PsmCas13b could give significant detection signals for 200, 20, and 2 zM input samples and allow for volume inputs of 250 μL and 540 μL.

### Example 6—Quantitative SHERLOCK with RPA

[0696] As SHERLOCK relies on an exponential amplification, accurate quantitation of nucleic acids can be difficult. Applicant hypothesized that reducing the efficiency of the RPA step could improve the correlation between the input amount and the signal of the SHERLOCK reaction. Applicant observed that the kinetics of the SHERLOCK detection were very sensitive to primer concentration across a range of sample concentrations (FIG. 101A-D). Applicant diluted primer concentrations, which increased both signal and quantitative accuracy (FIGS. 83G and 101E). This observation may be due to a decrease in primer-dimer formation, allowing for more effective amplification while preventing saturation. Primer concentrations of 120 nM exhibited the greatest correlation between signal and input (FIG. 101F). This accuracy was sustainable across a large range of concentrations down to the attomolar range (FIGS. 83H and 101G).

### Example 7—Two Color Multiplexing with Orthogonal Cas13 Orthologs

[0697] An advantageous feature of nucleic acid diagnostics is the ability to simultaneously detect multiple sample inputs, allowing for multiplexed detection panels or for in sample controls. Orthogonal base preferences of the Cas13 enzymes offer the opportunity to have multiplexed SHERLOCK. Applicant can assay the collateral activity of different Cas13 enzymes in the same reaction via fluorescent homopolymer sensors of different base identities and fluorophore colors, enabling multiple targets to be simultaneously measured (FIG. 84A). To demonstrate this concept, Applicant designed an LwaCas13a crRNA against the Zika virus ssRNA and a PsmCas13b crRNA against the Dengue virus ssRNA. Applicant found that this assay with both sets of Cas13-crRNA complexes in the same reaction, was capable of identifying if Zika or Dengue RNA, or both, were present in the reaction (FIG. 84B). Applicant also found that because of the orthogonal preferences between CcaCas13b and PsmCas13b, that these two enzymes could also be leveraged for multiplexed detection of Zika and Dengue targets (FIG. 102). Applicant was successfully able to extend this concept towards the entire SHERLOCK reaction, containing both multiplexed RPA primers and Cas13-crRNA complexes. Applicant designed an LwaCas13a crRNA against P. aeruginosa and a PsmCas13b crRNA against S. aureus and were able to detect both DNA targets down to the attomolar range (FIG. 84C). Similarly, using both PsmCas13b and LwaCas13a Applicant was able to achieve attomolar multiplexed detection of Zika and Dengue RNA using SHERLOCK (FIG. 103).

[0698] Applicant has shown that LwaCas13a enabled single nucleotide variant detection and that this could be applied for rapid genotyping from human saliva, but detection required two separate reactions: one for each allele-sensing crRNA. To enable a single-reaction SHERLOCK genotyping, Applicant designed a LwaCas13a crRNA against the G-allele and a PsmCas13b crRNA against the A-allele of the rs601338 SNP, a variant in the alpha(1,2)-fucosyltransferase FUT2 gene that associates with norovirus resistance. Using this single-sample multiplexed approach, Applicant was able to successfully genotype four different human subjects using their saliva and accurately identify whether they were homozygous or heterozygous.

[0699] To further showcase the versatility of the Cas13 family of enzymes, Applicant simulated a therapeutic approach that involves Cas13 serving as both a companion diagnostic and the therapy itself. Applicant recently developed PspCas13b for programmable RNA editing of transcripts, which can be used for correction mutations in genetic diseases, using a system called RNA Editing for Programmable A to I Replacement (REPAIR). Because diagnostics can be very useful when paired with therapies to guide treatment decisions or to monitor the outcome of a treatment, Applicant thought that SHERLOCK could be used for genotyping to guide the REPAIR treatment and also as a readout on the edited RNA to track the editing efficiency of the therapy (FIG. 84E). Applicant chose to demonstrate this theranostic concept to correct an APC mutation (APC:c.1262G>A) in Familial adenomatous polyposis 1, an inherited disorder that involves cancer in the large intestine and rectum. Applicant designed healthy and mutant cDNAs of the APC gene and transfected these into HEK293FT cells. Applicant was able to harvest the DNA from these cells and successfully genotype the correct samples using single-sample multiplexed SHERLOCK with LwaCas13a and PsmCas13b (FIG. 84F). Concurrently, Applicant designed and cloned guide RNAs for the REPAIR system and transfected cells that had the diseased genotype with the guide RNA and dPspCas13b-ADAR2dd(E488Q) REPAIR system. After 48 hours, Applicant harvested RNA, which Applicant split for input into SHERLOCK to detect the editing outcome and for next-generation sequencing (NGS) analysis to confirm the editing rate. Sequencing revealed that Applicant achieved 43% editing with the REPAIR system (FIG. 84G) and was able to detect this with SHERLOCK as the healthy-sensing crRNA showed higher signal than the non-targeting guide control condition and the disease-sensing crRNA showed a decrease in signal (FIGS. 84H and 104). Overall the design and synthesis of reagents for this assay took 3 days, the genotyping took 1 day, and the correction with REPAIR and sensing the editing rate took 3 days, yielding a total theranostic pipeline that lasts only 7 days.

[0700] Applicant has demonstrated the highly sensitive and specific detection of nucleic acids using the type VI RNA-guided RNA-targeting CRISPR-Cas13a ortholog from Leptotrichia wadei. Applicant has further shown that the Cas13b family of enzymes are active biochemically and have unique properties that make them amenable for multiplexed detection of nucleic acids by SHERLOCK. By characterizing the orthogonal base preferences of the Cas13b enzymes, Applicant found specific sequences of fluorescent RNA sensors that are recognized by PsmCas13b that LwaCas13a does not recognize. Applicant was able to leverage these base preferences to make in-sample multiplexed detection of two different targets possible and show the utility of this feature for distinguishing viral strains and genotyping individuals. Additionally, through engineering of the pre-amplification step, SHERLOCK can be made quantitative, allowing for approximation of the input nucleic acid concentration or quantitation. Applicant has additionally shown that the orthogonal PsmCas13b is capable of single molecule detection and that through scaling up the volume Applicant can perform detection of samples up to ˜0.5 mL and down to concentrations of 2 zM.

[0701] Multiplexed detection with SHERLOCK is possible by spatially performing multiple reactions, but in-sample multiplexing via orthogonal base preferences allows for many targets to be detected at scale and for cheaper cost. While Applicant has shown here two-input multiplexing, the cleavage motif screens enable the design of additional orthogonal cleavage sensors (FIG. 90). LwaCas13a and CcaCas13b, which both cleave the same uridine homopolymer and are thus not orthogonal as measured by homopolymer sensors (FIG. 83B), showed very unique cleavage preferences by the motif screens (FIG. 90). By screening additional Cas13a, Cas13b, and Cas13c orthologs, it is likely that many orthologs will reveal unique 6-mer motif preferences, which could theoretically allow for highly-multiplexed SHERLOCK limited only by the number of spectrally-unique fluorescent sensors. Highly-multiplexed SHERLOCK enables many technological applications, especially those involving complex input sensing and logical computation.

[0702] These additional refinements of Cas13-based detection for visual, more sensitive, and multiplexed readouts enable increased applications for nucleic acid detection, especially in settings where portable and instrument-free analysis are necessary. Rapid multiplexed genotyping can inform pharmacogenomic decisions, test for multiple crop traits in the field, or assess for the presence of co-occurring pathogens. Rapid, isothermal readout increases the accessibility of this detection for settings where power or portable readers are unavailable, even for rare species like circulating DNA. Improved CRISPR-based nucleic acid tests make it easier to understand the presence of nucleic acids in agriculture, pathogen detection, and chronic diseases.

### Example 8—SHERLOCK Colorimetric Detection

[0703] DNA quadruplexes can be used for biomolecule analyte detection (FIG. 110). In one case, the OTA-aptamer (blue) recognizes OTA, causing a conformational change that exposes the qradruplex (red) to bind hemin. The hemin-quadruplex complex has peroxidase activity which can then oxidize the TMB substrate to a colored form (generally blue in solution). Applicants have created RNA forms of these quadruplexes that Cas13 can degrade as part of the collateral activity described herein. Degradation causes a loss of RNA aptamer and thus a loss of color signal in the presence of nucleic acid target. Two exemplary designs are illustrated below.

1)
(SEQ ID NO: 538)
rUrGrGrGrUrUrGrGrGrUrUrGrGrGrUrUrGrGrGrA
2)
(SEQ ID NO: 539)
rUrGrGrGrUrUrUrGrGrGrUrUrUrGrGrGrUrUrUrGrGrGrA

[0704] The guanines form the key base pairs that generate the quadruplex structure and this then binds the hemin molecule. Applicants spaced the sets of guanines with uridine (shown in Bold) to allow Cas13 to degrade the quadruplex as the di-nucleotide data shows that guanines are poorly degraded.

[0705] Applicants tested the two aptamer designs at two different concentrations (FIG. 111). The lower 100 nM concentration was not enough for forming color. The 400 nM condition formed color. The matched absorbance data for this analysis was also quantitated (FIG. 112). Specifically, design 1 had the best results for b9 and design 2 had the best results for Lwa.

[0706] Applicants further tested the stability of the colorimetric change (FIG. 113). The Cas13 colorimetric change is stable after 1 hour. LwaCas13a colorimetric signal is stable over 1 hour while Cas13b9 color differential is less stable. Applicants observed that even the 100 nM aptamer condition now works for Cas13b9 because after an hour the color can come up due to substrate oxidation and a color difference can be observed.

[0707] Applicants compared colorimetric detection to fluorescence detection (FIG. 114). The 2 aM concentration could be detected with both systems, however the increase in fluorescence over the background was less than the decrease in colormetric detection over background. This indicates that the colormetric assay may provide more sensitive results.

[0708] The colorimetric assay is applicable for use as a diagnostic assay as described herein. In one embodiment, the quadruplexes are incubated with a test sample and the Cas13 SHERLOCK system. After an incubation period to allow Cas13 identification of a target sequence and for degradation of aptamers by collateral activity, substrate may be added. Absorbance may then be measured. In other embodiments, the substrate is included in the assay with the quadruplexes and the Cas13 SHERLOCK system.

### Example 9—Multiplex Platform Based on Unique Cleavage Preferences of CAS Enzymes

### Results

[0709] Many applications require detection of more than one target molecule in a single reaction, and we therefore sought to create a multiplex platform that relies on unique cleavage preferences of Cas enzymes (Abudayyeh et al. Science 353, aaf5573 (2016); Gootenberg et al. Science 356:438-442 (2017); East-Seletsky et al. Nature 538:270-273 (2016); East-Seletsky et al. Mol Cell 66:373-383 (2017)). To identify possible candidate enzymes compatible with multiplexing, we biochemically characterized three members of the CRISPR-Cas13a family and fourteen members of the CRISPR-Cas13b family (Shmakov et al. Nat Rev Microbiol 15:169-182 (2017); Smargon et al. Mol Cell 65:618-630 (2017)) (FIGS. 77, 85, 86 and Table 21). We profiled cleavage preferences on homopolymer reporters, and found that most orthologs preferred either uridine, a combination of bases, or adenine (FIG. 119 and Tables 22-25) and cleavage could be improved with buffer and crRNA design optimization (FIGS. 120-123, see methods). Among the adenine cleaving enzymes, PsmCas13b was more sensitive than LbaCas13a (FIG. 124). We refined the cleavage sequence preferences by evaluating collateral activity across di-nucleotide motifs (FIG. 125A), finding a large diversity of di-nucleotide cleavage motif preferences (FIGS. 126 and 127, and methods). From these di-nucleotide cleavage screens, we found that the activities of LwaCas13a, CcaCas13b, LbaCas13a and PsmCas13b could all be independently measured with the four di-nucleotide reporters AU, UC, AC, and GA, respectively (FIG. 125B and FIG. 128). Additionally, using a random in vitro RNA library motif cleavage screen, we identified numerous RNA 6-mers that allowed for further orthogonality between Cas13 enzymes (FIGS. 129-132 and methods).

TABLE 21
Cas13 and Csm6 Proteins Purified in this Study.

| Abbreviation | Protein name | Strain name | Benchling link | Accession number |
|---|---|---|---|---|
| Lwa | LwaCas13a | Leptotrichia | https://benchling.com/s/seq- | WP_021746774.1 |
| | | wadei | 66CfLwu7sLMQMbcXe7Ih | |
| Lba | LbaCas13a | Lachnospiraceae | https://benchling.com/s/seq- | WP_022785443.1 |
| | | bacterium | xdOysFqbmqAsTRoTiERc | |
| | | NK4A179 | | |
| Lbu | LbuCas13a | Leptotrichia | https://benchling.com/s/seq- | WP_015770004.1 |
| | | buccalis C- | e0aUn6uEVvWXntoggf60 | |
| | | 1013-b | | |
| Bzo | BzoCas13b | Bergeyelia | https://benchling.com/s/seq- | WP_002664492 |
| | | zoohelcum | mA3sJ4Gli4x0JB5q7KHK | |
| Pin | PinCas13b | Prevotella | https://benchling.com/s/seq- | WP_036860899 |
| | | intermedia | iA58bdz9mHOZmbFLj92f | |
| Pbu | PbuCas13b | Prevotella | https://benchling.com/s/seq- | WP_004343973 |
| | | buccae | nNv4KSgZDFtdPX88zSS2 | |
| Asp | AspCas13b | Alistipes sp. | https://benchling.com/s/seq- | WP_047447901 |
| | | ZOR0009 | IHs6D7J5Z2NkCbbkggek | |
| Psm | PsmCas13b | Prevotella sp. | https://benchling.com/s/seq- | WP_036929175 |
| | | MA2016 | v7Q1TzaZzAyNZIGKNnH3 | |
| Ran | RanCas13b | Riemerella | https://benchling.com/s/seq- | WP_004919755 |
| | | anatipestifer | HIhclUZszBOQAdW5dmW | |
| Pau | PauCas13b | Prevotella | https://benchling.com/s/seq- | WP_025000926 |
| | | aurantiaca | Se9MuspJQek3x4vvR1BF | |
| Psa | PsaCas13b | Prevotella | https://benchling.com/s/seq- | WP_051522484 |
| | | saccharolytica | NXtrOPLbhpyc9nZk1seq | |
| Pin2 | Pin2Cas13b | Prevotella | https://benchling.com/s/seq- | WP_061866553 |
| | | intermedia | mSXhS57arjPDuvnQjZOn | |
| Cca | CcaCas13b | Capnocytophaga | https://benchling.com/s/seq- | WP_013997271 |
| | | canimorsus | BNVzFUQjqSnkYLARxLwE | |
| Pgu | PguCas13b | Porphyramonas | https://benchling.com/s/seq- | WP_039434803 |
| | | gulae | GVOv8zBVIta2utHyuTSR | |
| Psp | PspCas13b | Prevotella sp. | https://benchling.com/s/seq- | WP_044065294 |
| | | P5-125 | XmnWQgXrpvVAwXoNtJGw | |
| Pig | PiqCas13b | Porphyromonas | https://benchling.com/s/seq- | WP_053444417 |
| | | gingivalis | hxdDNJtJmA5axRvcxrn0p | |
| Pin3 | Pin3Cas13b | Prevotella | https://benchling.com/s/seq- | WP_050955369 |
| | | intermedia | GlaCfl5cDw4sKXz6LM11 | |
| Ei | EiCsm6 | Enterococcus | https://benchling.com/s/seq- | WP_007208953.1 |
| | | italicus | YrP8xiVG3rBwxYMgCUH0 | |
| Ls | LsCsm6 | Lactobacillus | https://benchling.com/s/seq- | WP_081509150.1 |
| | | salivarius | duuAaForfhsBc53zLY5z | |
| Tt | TtCsm6 | Thermos | https://benchling.com/s/seq- | WP_011229148.1 |
| | | thermophilus | esibVH1rmHPjHYXxKWja | |

TABLE 22
crRNA Used in this Study. Shown are SEQ ID NO: 540-863, with SEQ ID
NOs: 540, 541, and 542 representing the complete crRNA sequence, spacer, and direct repeat,
respectively, etc.

| | | Complete crRNA | | Direct | | |
|---|---|---|---|---|---|---|
| Name | Ortholog | sequence | Spacer | repeat | Target | 1st FIG. |
| ssRNA/ssDNA 1 | LwaCas13a | GATTTAGACTACCCCAAAA | CTACCAAG | GATTTAGACTAC | ssRNA 1 | FIG. 1B/FIG. |
| crRNA 2 | | ACGAAGGGGACTAAAACCT | TAATCCAT | CCCAAAAACGAA | | S3 |
| | | ACCAAGTAATCCATATTTC | ATTTCTAG | GGGGACTAAAAC | | |
| | | TAGAGGATC | AGGATC | | | |
| BzoCas13b | BzoCas13b | CTACCAAGTAATCCATATT | CTACCAAG | GTTGGAACTGCT | ssRNA 1 | FIG. 1B/FIG. |
| ssRNA/ssDNA | | TCTAGAGGATCGTTGGAAC | TAATCCAT | CTCATTTTGGAG | | S3 |
| crRNA 2 | | TGCTCTCATTTTGGAGGGT | ATTTCTAG | GGTAATCACAAC | | |
| | | AATCACAAC | AGGATC | | | |
| PinCas13b | PinCas13b | CTACCAAGTAATCCATATT | CTACCAAG | GTTGCATCTGCC | ssRNA 1 | FIG. 1B/FIG. |
| ssRNA/ssDNA | | TCTAGAGGATCGTTGCATC | TAATCCAT | TGCTGTTTGCAA | | S3 |
| crRNA 2 | | TGCCTGCTGTTTGCAAGGT | ATTTCTAG | GGTAAAAACAAC | | |
| | | AAAAACAAC | AGGATC | | | |
| PbuCas13b | PbuCas13b | CTACCAAGTAATCCATATT | CTACCAAG | GTTGCATCTGCC | ssRNA 1 | FIG. 1B/FIG. |
| ssRNA/ssDNA | | TCTAGAGGATCGTTGCATC | TAATCCAT | TTCTTTTTGAAA | | S3 |
| crRNA 2 | | TGCCTTCTTTTTGAAAGGT | ATTTCTAG | GGTAAAAACAAC | | |
| | | AAAAACAAC | AGGATC | | | |
| AspCas13b | AspCas13b | CTACCAAGTAATCCATATT | CTACCAAG | GCTGTTATATCC | ssRNA 1 | FIG. 1B/FIG. |
| ssRNA/ssDNA | | TCTAGAGGATCGCTGTTAT | TAATCCAT | TTACCTTTGTAA | | S3 |
| crRNA 2 | | ATCCTTACCTTTGTAAGGG | ATTTCTAG | GGGAAGTACAGC | | |
| | | AAGTACAGC | AGGATC | | | |
| PsmCas13b | PsmCas13b | CTACCAAGTAATCCATATT | CTACCAAG | GTTGTAGAAGCT | ssRNA 1 | FIG. 1B/FIG. |
| ssRNA/ssDNA | | TCTAGAGGATCGTTGTAGA | TAATCCAT | TATCGTTTGGAT | | S3 |
| crRNA 2 | | AGCTTATCGTTTGGATAGG | ATTTCTAG | AGGTATGACAAC | | |
| | | TATGACAAC | AGGATC | | | |
| RanCas13b | RanCas13b | CTACCAAGTAATCCATATT | CTACCAAG | GTTGGGACTGCT | ssRNA 1 | FIG. 1B/FIG. |
| ssRNA/ssDNA | | TCTAGAGGATCGTTGGGAC | TAATCCAT | CTCACTTTGAAG | | S3 |
| crRNA 2 | | TGCTCTCACTTTGAAGGGT | ATTTCTAG | GGTATTCACAAC | | |
| | | ATTCACAAC | AGGATC | | | |
| PauCas13b | PauCas13b | CTACCAAGTAATCCATATT | CTACCAAG | GTTGTATCTGCC | ssRNA 1 | FIG. 1B/FIG. |
| ssRNA/ssDNA | | TCTAGAGGATCGTTGTATC | TAATCCAT | TTCTGTTTGAAA | | S3 |
| crRNA 2 | | TGCCTTCTGTTTGAAAGGT | ATTTCTAG | GGTAAAAACAAC | | |
| | | AAAAACAAC | AGGATC | | | |
| PsaCas13b | PsaCas13b | CTACCAAGTAATCCATATT | CTACCAAG | GTTGTGTCTACC | ssRNA 1 | FIG. 1B/FIG. |
| ssRNA/ssDNA | | TCTAGAGGATCGTTGTGTC | TAATCCAT | TCCTTTTTGAGA | | S3 |
| crRNA 2 | | TACCTCCTTTTTGAGAGGT | ATTTCTAG | | | |
| | | AAAAACAGC | AGGATC | GGTAAAAACAGC | | |
| Pin2Cas13b | Pin2Cas13b | CTACCAAGTAATCCATATT | CTACCAAG | GTTGCATCTGCC | ssRNA 1 | FIG. 1B/FIG. |
| ssRNA/ssDNA | | TCTAGAGGATCGTTGCATC | TAATCCAT | TGCTGTTTGCAA | | S3 |
| crRNA 2 | | TGCCTGCTGTTTGCAAGGT | ATTTCTAG | GGTAAAAACAAC | | |
| | | AAAAACAAC | AGGATC | | | |
| CcaCas13b | CcaCas13b | CTACCAAGTAATCCATATT | CTACCAAG | GTTGGAACTGCT | ssRNA 1 | FIG. 1B/FIG. |
| ssRNA/ssDNA | | TCTAGAGGATCGTTGGAAC | TAATCCAT | CTCATTTTGGAG | | S3 |
| crRNA 2 | | TGCTCTCATTTTGGAGGGT | ATTTCTAG | GGTAATCACAAC | | |
| | | AATCACAAC | AGGATC | | | |
| PguCas13b | PguCas13b | CTACCAAGTAATCCATATT | CTACCAAG | GTTGGATCTACC | ssRNA 1 | FIG. 1B/FIG. |
| ssRNA/ssDNA | | TCTAGAGGATCGTTGGATC | TAATCCAT | CTCTATTTGAAG | | S3 |
| crRNA 2 | | TACCCTCTATTTGAAGGGT | ATTTCTAG | GGTACACACAAC | | |
| | | ACACACAAC | AGGATC | | | |
| PspCas13b | PspCas13b | CTACCAAGTAATCCATATT | CTACCAAG | GTTGTGGAAGGT | ssRNA 1 | FIG. 1B/FIG. |
| ssRNA/ssDNA | | TCTAGAGGATCGTTGTGGA | TAATCCAT | CCAGTTTTGAGG | | S3 |
| crRNA 2 | | AGGTCCAGTTTTGAGGGGC | ATTTCTAG | GGCTATTACAAC | | |
| | | TATTACAAC | AGGATC | | | |
| PigCas13b | PigCas13b | CTACCAAGTAATCCATATT | CTACCAAG | GTTGGATCTACC | ssRNA 1 | FIG. 1B/FIG. |
| ssRNA/ssDNA | | TCTAGAGGATCGTTGGATC | TAATCCAT | CTCTATTCGAAG | | S3 |
| crRNA 2 | | TACCCTCTATTCGAAGGGT | ATTTCTAG | GGTACACACAAC | | |
| | | ACACACAAC | AGGATC | | | |
| Pin3Cas13b | Pin3Cas13b | CTACCAAGTAATCCATATT | CTACCAAG | GTTGCATCTGCC | ssRNA 1 | FIG. 1B/FIG. |
| ssRNA/ssDNA | | TCTAGAGGATCGTTGCATC | TAATCCAT | TGCTGTTTGCAA | | S3 |
| crRNA 2 | | TGCCTGCTGTTTGCAAGGT | ATTTCTAG | GGTAAAAACAAC | | |
| | | AAAAACAAC | AGGATC | | | |
| DENV crRNA | LwaCas13a | GATTTAGACTACCCCAAAA | TGCTTCTG | GATTTAGACTAC | DENV | FIG. 1D |
| LwaCas13a | | ACGAAGGGGACTAAAACTG | TCCAGTGA | CCCAAAAACGAA | ssRNA | |
| | | CTTCTGTCCAGTGAGCATG | GCATGGTC | GGGGACTAAAAC | | |
| | | GTCTTCG | TTCG | | | |
| DENV crRNA | PsmCas13b | TTTGCTTCTGTCCAGTGAG | TTTGCTTC | GTTGTAGAAGCT | DENV | FIG. 1D |
| PsmCas13b | | CATGGTCTTCGGTTGTAGA | TGTCCAGT | TATCGTTTGGAT | ssRNA | |
| | | AGCTTATCGTTTGGATAGG | GAGCATGG | AGGTATGACAAC | | |
| | | TATGACAAC | TCTTCG | | | |
| DENV | LbuCas13a | GACCACCCCAAAAATGAAG | TGCTTCTG | GACCACCCCAAA | DENV | FIG. S7C |
| LbuCas13a 22nt | | GGGACTAAAACATGCTTCT | TCCAGTGA | AATGAAGGGGAC | ssRNA | |
| spacer | | GTCCAGTGAGCATGG | GCATGG | TAAAACA | | |
| DENV | LbuCas13a | GACCACCCCAAAAATGAAG | TGCTTCTG | GACCACCCCAAA | DENV | FIG. S7C |
| LbuCas13a 20nt | | GGGACTAAAACATGCTTCT | TCCAGTGA | AATGAAGGGGAC | ssRNA | |
| spacer | | GTCCAGTGAGCAT | GCAT | TAAAACA | | |
| DENV | LbuCas13a | GACCACCCCAAAAATGAAG | TGCTTCTG | GACCACCCCAAA | DENV | FIG. S7C |
| LbuCas13a 18nt | | GGGACTAAAACATGCTTCT | TCCAGTGA | AATGAAGGGGAC | ssRNA | |
| spacer | | GTCCAGTGAGC | GC | TAAAACA | | |
| CcaCas13b | CcaCas13b | TGTTCTACCAAGTAATCCA | TGTTCTAC | GTTGGAACTGCT | ssRNA 1 | FIG. S10A |
| spacer test 34 nt | | TATTTCTAGAGGATCGTTG | CAAGTAAT | CTCATTTTGGAG | | |
| | | GAACTGCTCTCATTTTGGA | CCATATTT | GGTAATCACAAC | | |
| | | GGGTAATCACAAC | CTAGAGGA | | | |
| | | | TC | | | |
| CcaCas13b | CcaCas13b | GTTCTACCAAGTAATCCAT | GTTCTACC | GTTGGAACTGCT | ssRNA 1 | FIG. S10A |
| spacer test 33 nt | | ATTTCTAGAGGATCGTTGG | AAGTAATC | CTCATTTTGGAG | | |
| | | AACTGCTCTCATTTTGGAG | CATATTTC | GGTAATCACAAC | | |
| | | GGTAATCACAAC | TAGAGGAT | | | |
| | | | C | | | |
| CcaCas13b | CcaCas13b | TTCTACCAAGTAATCCATA | TTCTACCA | GGTAATCACAAC | ssRNA 1 | FIG. S10A |
| spacer test 32 nt | | TTTCTAGAGGATCGTTGGA | AGTAATCC | GTTGGAACTGCT | | |
| | | ACTGCTCTCATTTTGGAGG | ATATTTCT | CTCATTTTGGAG | | |
| | | GTAATCACAAC | AGAGGATC | | | |
| CcaCas13b | CcaCas13b | TCTACCAAGTAATCCATAT | TCTACCAA | GTTGGAACTGCT | ssRNA 1 | FIG. S10A |
| spacer test 31 nt | | TTCTAGAGGATCGTTGGAA | GTAATCCA | CTCATTTTGGAG | | |
| | | CTGCTCTCATTTTGGAGGG | TATTTCTA | GGTAATCACAAC | | |
| | | TAATCACAAC | GAGGATC | | | |
| CcaCas13b | CcaCas13b | CTACCAAGTAATCCATATT | CTACCAAG | GTTGGAACTGCT | ssRNA 1 | FIG. S10A |
| spacer test 30 nt | | TCTAGAGGATCGTTGGAAC | TAATCCAT | CTCATTTTGGAG | | |
| | | TGCTCTCATTTTGGAGGGT | ATTTCTAG | GGTAATCACAAC | | |
| | | AATCACAAC | AGGATC | | | |
| CcaCas13b | CcaCas13b | TACCAAGTAATCCATATTT | TACCAAGT | GTTGGAACTGCT | ssRNA 1 | FIG. S10A |
| spacer test 29 nt | | CTAGAGGATCGTTGGAACT | AATCCATA | CTCATTTTGGAG | | |
| | | GCTCTCATTTTGGAGGGTA | TTTCTAGA | GGTAATCACAAC | | |
| | | ATCACAAC | GGATC | | | |
| CcaCas13b | CcaCas13b | ACCAAGTAATCCATATTTC | ACCAAGTA | GTTGGAACTGCT | ssRNA 1 | FIG. S10A |
| spacer test 28 nt | | TAGAGGATCGTTGGAACTG | ATCCATAT | CTCATTTTGGAG | | |
| | | CTCTCATTTTGGAGGGTAA | TTCTAGAG | GGTAATCACAAC | | |
| | | TCACAAC | GATC | | | |
| CcaCas13b | CcaCas13b | CCAAGTAATCCATATTTCT | CCAAGTAA | GTTGGAACTGCT | ssRNA 1 | FIG. S10A |
| spacer test 27 nt | | AGAGGATCGTTGGAACTGC | TCCATATT | CTCATTTTGGAG | | |
| | | TCTCATTTTGGAGGGTAAT | TCTAGAGG | GGTAATCACAAC | | |
| | | CACAAC | ATC | | | |
| CcaCas13b | CcaCas13b | CAAGTAATCCATATTTCTA | CAAGTAAT | GTTGGAACTGCT | ssRNA 1 | FIG. S10A |
| spacer test 26 nt | | GAGGATCGTTGGAACTGCT | CCATATTT | CTCATTTTGGAG | | |
| | | CTCATTTTGGAGGGTAATC | CTAGAGGA | GGTAATCACAAC | | |
| | | ACAAC | TC | | | |
| CcaCas13b | CcaCas13b | AAGTAATCCATATTTCTAG | AAGTAATC | GTTGGAACTGCT | ssRNA 1 | FIG. S10A |
| spacer test 25 nt | | AGGATCGTTGGAACTGCTC | CATATTTC | CTCATTTTGGAG | | |
| | | TCATTTTGGAGGGTAATCA | TAGAGGAT | GGTAATCACAAC | | |
| | | CAAC | C | | | |
| CcaCas13b | CcaCas13b | AGTAATCCATATTTCTAGA | AGTAATCC | GTTGGAACTGCT | ssRNA 1 | FIG. S10A |
| spacer test 24 nt | | GGATCGTTGGAACTGCTCT | ATATTTCT | CTCATTTTGGAG | | |
| | | CATTTTGGAGGGTAATCAC | AGAGGATC | GGTAATCACAAC | | |
| | | AAC | | | | |
| CcaCas13b | CcaCas13b | GTAATCCATATTTCTAGAG | GTAATCCA | GTTGGAACTGCT | ssRNA 1 | FIG. S10A |
| spacer test 23 nt | | GATCGTTGGAACTGCTCTC | TATTTCTA | CTCATTTTGGAG | | |
| | | ATTTTGGAGGGTAATCACA | GAGGATC | GGTAATCACAAC | | |
| | | AC | | | | |
| CcaCas13b | CcaCas13b | TAATCCATATTTCTAGAGG | TAATCCAT | GTTGGAACTGCT | ssRNA 1 | FIG. S10A |
| spacer test 22 nt | | ATCGTTGGAACTGCTCTCA | ATTTCTAG | CTCATTTTGGAG | | |
| | | TTTTGGAGGGTAATCACAA C | AGGATC | GGTAATCACAAC | | |
| CcaCas13b | CcaCas13b | AATCCATATTTCTAGAGGA | AATCCATA | GTTGGAACTGCT | ssRNA 1 | FIG. S10A |
| spacer test 21 nt | | TCGTTGGAACTGCTCTCAT | TTTCTAGA | CTCATTTTGGAG | | |
| | | TTTGGAGGGTAATCACAAC | GGATC | GGTAATCACAAC | | |
| CcaCas13b | CcaCas13b | ATCCATATTTCTAGAGGAT | ATCCATAT | GTTGGAACTGCT | ssRNA 1 | FIG. S10A |
| spacer test 20 nt | | CGTTGGAACTGCTCTCATT | TTCTAGAG | CTCATTTTGGAG | | |
| | | TTGGAGGGTAATCACAAC | GATC | GGTAATCACAAC | | |
| CcaCas13b | CcaCas13b | TCCATATTTCTAGAGGATC | TCCATATT | GTTGGAACTGCT | ssRNA 1 | FIG. S10A |
| spacer test 19 nt | | GTTGGAACTGCTCTCATTT | TCTAGAGG | CTCATTTTGGAG | | |
| | | TGGAGGGTAATCACAAC | ATC | GGTAATCACAAC | | |
| CcaCas13b | CcaCas13b | CCATATTTCTAGAGGATCG | CCATATTT | GTTGGAACTGCT | ssRNA 1 | FIG. S10A |
| spacer test 18 nt | | TTGGAACTGCTCTCATTTT | CTAGAGGA | CTCATTTTGGAG | | |
| | | GGAGGGTAATCACAAC | TC | GGTAATCACAAC | | |
| CcaCas13b | CcaCas13b | CATATTTCTAGAGGATCGT | CATATTTC | GTTGGAACTGCT | ssRNA 1 | FIG. S10A |
| spacer test 17 nt | | TGGAACTGCTCTCATTTTG | TAGAGGAT | CTCATTTTGGAG | | |
| | | GAGGGTAATCACAAC | C | GGTAATCACAAC | | |
| CcaCas13b | CcaCas13b | ATATTTCTAGAGGATCGTT | ATATTTCT | GTTGGAACTGCT | ssRNA 1 | FIG. S10A |
| spacer test 16 nt | | GGAACTGCTCTCATTTTGG | AGAGGATC | CTCATTTTGGAG | | |
| | | AGGGTAATCACAAC | | GGTAATCACAAC | | |
| CcaCas13b | CcaCas13b | TATTTCTAGAGGATCGTTG | TATTTCTA | GTTGGAACTGCT | ssRNA 1 | FIG. S10A |
| spacer test 15 nt | | GAACTGCTCTCATTTTGGA | GAGGATC | CTCATTTTGGAG | | |
| | | GGGTAATCACAAC | | GGTAATCACAAC | | |
| CcaCas13b | CcaCas13b | ATTTCTAGAGGATCGTTGG | ATTTCTAG | GTTGGAACTGCT | ssRNA 1 | FIG. S10A |
| spacer test 14 nt | | AACTGCTCTCATTTTGGAG | AGGATC | CTCATTTTGGAG | | |
| | | GGTAATCACAAC | | GGTAATCACAAC | | |
| CcaCas13b | CcaCas13b | TTTCTAGAGGATCGTTGGA | TTTCTAGA | GTTGGAACTGCT | ssRNA 1 | FIG. S10A |
| spacer test 13 nt | | ACTGCTCTCATTTTGGAGG | GGATC | CTCATTTTGGAG | | |
| | | GTAATCACAAC | | GGTAATCACAAC | | |
| CcaCas13b | CcaCas13b | TTCTAGAGGATCGTTGGAA | TTCTAGAG | GTTGGAACTGCT | ssRNA 1 | FIG. S10A |
| spacer test 12 nt | | CTGCTCTCATTTTGGAGGG | GATC | CTCATTTTGGAG | | |
| | | TAATCACAAC | | GGTAATCACAAC | | |
| PsmCas13b | PsmCas13b | TGTTCTACCAAGTAATCCA | TGTTCTAC | GTTGTAGAAGCT | ssRNA 1 | FIG. S10B |
| spacer test 34 nt | | TATTTCTAGAGGATCGTTG | CAAGTAAT | TATCGTTTGGAT | | |
| | | TAGAAGCTTATCGTTTGGA | CCATATTT | AGGTATGACAAC | | |
| | | TAGGTATGACAAC | CTAGAGGA | | | |
| | | | TC | | | |
| PsmCas13b | PsmCas13b | GTTCTACCAAGTAATCCAT | GTTCTACC | GTTGTAGAAGCT | ssRNA 1 | FIG. S10B |
| spacer test 33 nt | | ATTTCTAGAGGATCGTTGT | AAGTAATC | TATCGTTTGGAT | | |
| | | AGAAGCTTATCGTTTGGAT | CATATTTC | AGGTATGACAAC | | |
| | | AGGTATGACAAC | TAGAGGAT | | | |
| | | | C | | | |
| PsmCas13b | PsmCas13b | TTCTACCAAGTAATCCATA | TTCTACCA | GTTGTAGAAGCT | ssRNA 1 | FIG. S10B |
| spacer test 32 nt | | TTTCTAGAGGATCGTTGTA | AGTAATCC | TATCGTTTGGAT | | |
| | | GAAGCTTATCGTTTGGATA | ATATTTCT | AGGTATGACAAC | | |
| | | GGTATGACAAC | AGAGGATC | | | |
| PsmCas13b | PsmCas13b | TCTACCAAGTAATCCATAT | TCTACCAA | GTTGTAGAAGCT | ssRNA 1 | FIG. S10B |
| spacer test 31 nt | | TTCTAGAGGATCGTTGTAG | GTAATCCA | TATCGTTTGGAT | | |
| | | AAGCTTATCGTTTGGATAG | TATTTCTA | AGGTATGACAAC | | |
| | | GTATGACAAC | GAGGATC | | | |
| PsmCas13b | PsmCas13b | CTACCAAGTAATCCATATT | CTACCAAG | GTTGTAGAAGCT | ssRNA 1 | FIG. S10B |
| spacer test 30 nt | | TCTAGAGGATCGTTGTAGA | TAATCCAT | TATCGTTTGGAT | | |
| | | AGCTTATCGTTTGGATAGG | ATTTCTAG | AGGTATGACAAC | | |
| | | TATGACAAC | AGGATC | | | |
| PsmCas13b | PsmCas13b | TACCAAGTAATCCATATTT | TACCAAGT | GTTGTAGAAGCT | ssRNA 1 | FIG. S10B |
| spacer test 29 nt | | CTAGAGGATCGTTGTAGAA | AATCCATA | TATCGTTTGGAT | | |
| | | GCTTATCGTTTGGATAGGT | TTTCTAGA | AGGTATGACAAC | | |
| | | ATGACAAC | GGATC | | | |
| PsmCas13b | PsmCas13b | ACCAAGTAATCCATATTTC | ACCAAGTA | GTTGTAGAAGCT | ssRNA 1 | FIG. S10B |
| spacer test 28 nt | | TAGAGGATCGTTGTAGAAG | ATCCATAT | TATCGTTTGGAT | | |
| | | CTTATCGTTTGGATAGGTA | TTCTAGAG | AGGTATGACAAC | | |
| | | TGACAAC | GATC | | | |
| PsmCas13b | PsmCas13b | CCAAGTAATCCATATTTCT | CCAAGTAA | GTTGTAGAAGCT | ssRNA 1 | FIG. S10B |
| spacer test 27 nt | | AGAGGATCGTTGTAGAAGC | TCCATATT | TATCGTTTGGAT | | |
| | | TTATCGTTTGGATAGGTAT | TCTAGAGG | AGGTATGACAAC | | |
| | | GACAAC | ATC | | | |
| PsmCas13b | PsmCas13b | CAAGTAATCCATATTTCTA | CAAGTAAT | GTTGTAGAAGCT | ssRNA 1 | FIG. S10B |
| spacer test 26 nt | | GAGGATCGTTGTAGAAGCT | CCATATTT | TATCGTTTGGAT | | |
| | | TATCGTTTGGATAGGTATG | CTAGAGGA | AGGTATGACAAC | | |
| | | ACAAC | TC | | | |
| PsmCas13b | PsmCas13b | AAGTAATCCATATTTCTAG | AAGTAATC | GTTGTAGAAGCT | ssRNA 1 | FIG. S10B |
| spacer test 25 nt | | AGGATCGTTGTAGAAGCTT | CATATTTC | TATCGTTTGGAT | | |
| | | ATCGTTTGGATAGGTATGA | TAGAGGAT | AGGTATGACAAC | | |
| | | CAAC | C | | | |
| PsmCas13b | PsmCas13b | AGTAATCCATATTTCTAGA | AGTAATCC | GTTGTAGAAGCT | ssRNA 1 | FIG. S10B |
| spacer test 24 nt | | GGATCGTTGTAGAAGCTTA | ATATTTCT | TATCGTTTGGAT | | |
| | | TCGTTTGGATAGGTATGAC | AGAGGATC | AGGTATGACAAC | | |
| | | AAC | | | | |
| PsmCas13b | PsmCas13b | GTAATCCATATTTCTAGAG | GTAATCCA | GTTGTAGAAGCT | ssRNA 1 | FIG. S10B |
| spacer test 23 nt | | GATCGTTGTAGAAGCTTAT | TATTTCTA | TATCGTTTGGAT | | |
| | | CGTTTGGATAGGTATGACA | GAGGATC | AGGTATGACAAC | | |
| | | AC | | | | |
| PsmCas13b | PsmCas13b | TAATCCATATTTCTAGAGG | TAATCCAT | GTTGTAGAAGCT | ssRNA 1 | FIG. S10B |
| spacer test 22 nt | | ATCGTTGTAGAAGCTTATC | ATTTCTAG | TATCGTTTGGAT | | |
| | | GTTTGGATAGGTATGACAA C | AGGATC | AGGTATGACAAC | | |
| PsmCas13b | PsmCas13b | AATCCATATTTCTAGAGGA | AATCCATA | GTTGTAGAAGCT | ssRNA 1 | FIG. S10B |
| spacer test 21 nt | | TCGTTGTAGAAGCTTATCG | TTTCTAGA | TATCGTTTGGAT | | |
| | | TTTGGATAGGTATGACAAC | GGATC | AGGTATGACAAC | | |
| PsmCas13b | PsmCas13b | ATCCATATTTCTAGAGGAT | ATCCATAT | GTTGTAGAAGCT | ssRNA 1 | FIG. S10B |
| spacer test 20 nt | | CGTTGTAGAAGCTTATCGT | TTCTAGAG | TATCGTTTGGAT | | |
| | | TTGGATAGGTATGACAAC | GATC | AGGTATGACAAC | | |
| PsmCas13b | PsmCas13b | TCCATATTTCTAGAGGATC | TCCATATT | GTTGTAGAAGCT | ssRNA 1 | FIG. S10B |
| spacer test 19 nt | | GTTGTAGAAGCTTATCGTT | TCTAGAGG | TATCGTTTGGAT | | |
| | | TGGATAGGTATGACAAC | ATC | AGGTATGACAAC | | |
| PsmCas13b | PsmCas13b | CCATATTTCTAGAGGATCG | CCATATTT | GTTGTAGAAGCT | ssRNA 1 | FIG. S10B |
| spacer test 18 nt | | TTGTAGAAGCTTATCGTTT | CTAGAGGA | TATCGTTTGGAT | | |
| | | GGATAGGTATGACAAC | TC | AGGTATGACAAC | | |
| PsmCas13b | PsmCas13b | CATATTTCTAGAGGATCGT | CATATTTC | GTTGTAGAAGCT | ssRNA 1 | FIG. S10B |
| spacer test 17 nt | | TGTAGAAGCTTATCGTTTG | TAGAGGAT | TATCGTTTGGAT | | |
| | | GATAGGTATGACAAC | C | AGGTATGACAAC | | |
| PsmCas13b | PsmCas13b | ATATTTCTAGAGGATCGTT | ATATTTCT | GTTGTAGAAGCT | ssRNA 1 | FIG. S10B |
| spacer test 16 nt | | GTAGAAGCTTATCGTTTGG | AGAGGATC | TATCGTTTGGAT | | |
| | | ATAGGTATGACAAC | | AGGTATGACAAC | | |
| PsmCas13b | PsmCas13b | TATTTCTAGAGGATCGTTG | TATTTCTA | GTTGTAGAAGCT | ssRNA 1 | FIG. S10B |
| spacer test 15 nt | | TAGAAGCTTATCGTTTGGA | GAGGATC | TATCGTTTGGAT | | |
| | | TAGGTATGACAAC | | AGGTATGACAAC | | |
| PsmCas13b | PsmCas13b | ATTTCTAGAGGATCGTTGT | ATTTCTAG | GTTGTAGAAGCT | ssRNA 1 | FIG. S10B |
| spacer test 14 nt | | AGAAGCTTATCGTTTGGAT | AGGATC | TATCGTTTGGAT | | |
| | | AGGTATGACAAC | | AGGTATGACAAC | | |
| PsmCas13b | PsmCas13b | TTTCTAGAGGATCGTTGTA | TTTCTAGA | GTTGTAGAAGCT | ssRNA 1 | FIG. S10B |
| spacer test 13 nt | | GAAGCTTATCGTTTGGATA | GGATC | TATCGTTTGGAT | | |
| | | GGTATGACAAC | | AGGTATGACAAC | | |
| PsmCas13b | PsmCas13b | TTCTAGAGGATCGTTGTAG | TTCTAGAG | GTTGTAGAAGCT | ssRNA 1 | FIG. S10B |
| spacer test 12 nt | | AAGCTTATCGTTTGGATAG | GATC | TATCGTTTGGAT | | |
| | | GTATGACAAC | | AGGTATGACAAC | | |
| LwaCas13a | LwaCas13a | GATTTAGACTACCCCAAAA | CCGGGTAC | GATTTAGACTAC | ssRNA 1 | FIG. S11 |
| tiling crRNA 1 | | ACGAAGGGGACTAAAACCC | CGAGCTCG | CCCAAAAACGAA | | |
| | | GGGTACCGAGCTCGAATTC | AATTCACT | GGGGACTAAAAC | | |
| | | ACTGGCC | GGCC | | | |
| LwaCas13a | LwaCas13a | GATTTAGACTACCCCAAAA | TTTCTAGA | GATTTAGACTAC | ssRNA 1 | FIG. S11 |
| tiling crRNA 2 | | ACGAAGGGGACTAAAACTT | GGATCCCC | CCCAAAAACGAA | | |
| | | TCTAGAGGATCCCCGGGTA | GGGTACCG | GGGGACTAAAAC | | |
| | | CCGAGCT | AGCT | | | |
| LwaCas13a | LwaCas13a | GATTTAGACTACCCCAAAA | CCAAGTAA | GATTTAGACTAC | ssRNA 1 | FIG. S11 |
| tiling crRNA 3 | | ACGAAGGGGACTAAAACCC | TCCATATT | CCCAAAAACGAA | | |
| | | AAGTAATCCATATTTCTAG | TCTAGAGG | GGGGACTAAAAC | | |
| | | AGGATCC | ATCC | | | |
| LwaCas13a | LwaCas13a | GATTTAGACTACCCCAAAA | AGATTGCT | GATTTAGACTAC | ssRNA 1 | FIG. S11 |
| tiling crRNA 4 | | ACGAAGGGGACTAAAACAG | GTTCTACC | CCCAAAAACGAA | | |
| | | ATTGCTGTTCTACCAAGTA | AAGTAATC | GGGGACTAAAAC | | |
| | | ATCCATA | CATA | | | |
| LwaCas13a | LwaCas13a | GATTTAGACTACCCCAAAA | CCTGCAGG | GATTTAGACTAC | ssRNA 1 | FIG. S11 |
| tiling crRNA 5 | | ACGAAGGGGACTAAAACCC | TCGAGTAG | CCCAAAAACGAA | | |
| | | TGCAGGTCGAGTAGATTGC | ATTGCTGT | GGGGACTAAAAC | | |
| | | TGTTCTA | TCTA | | | |
| LwaCas13a | LwaCas13a | GATTTAGACTACCCCAAAA | GCCAAGCT | GATTTAGACTAC | ssRNA 1 | FIG. S11 |
| tiling crRNA 6 | | ACGAAGGGGACTAAAACGC | TGCATGCC | CCCAAAAACGAA | | |
| | | CAAGCTTGCATGCCTGCAG | TGCAGGTC | GGGGACTAAAAC | | |
| | | GTCGAGT | GAGT | | | |
| LwaCas13a | LwaCas13a | GATTTAGACTACCCCAAAA | ATGACCAT | GATTTAGACTAC | ssRNA 1 | FIG. S11 |
| tiling crRNA 7 | | ACGAAGGGGACTAAAACAT | GATTACGC | CCCAAAAACGAA | | |
| | | GACCATGATTACGCCAAGC | CAAGCTTG | GGGGACTAAAAC | | |
| | | TTGCATG | CATG | | | |
| LwaCas13a | LwaCas13a | GATTTAGACTACCCCAAAA | CACAGGAA | GATTTAGACTAC | ssRNA 1 | FIG. S11 |
| tiling crRNA 8 | | ACGAAGGGGACTAAAACCA | ACAGCTAT | CCCAAAAACGAA | | |
| | | CAGGAAACAGCTATGACCA | GACCATGA | GGGGACTAAAAC | | |
| | | TGATTAC | TTAC | | | |
| LwaCas13a | LwaCas13a | GATTTAGACTACCCCAAAA | TGTGAGCG | GATTTAGACTAC | ssRNA 1 | FIG. S11 |
| tiling crRNA 9 | | ACGAAGGGGACTAAAACTG | GATAAACA | CCCAAAAACGAA | | |
| | | TGAGCGGATAAACACAGGA | CAGGAAAC | GGGGACTAAAAC | | |
| | | AACAGCT | AGCT | | | |
| LwaCas13a | LwaCas13a | GATTTAGACTACCCCAAAA | ATGTTGTG | GATTTAGACTAC | ssRNA 1 | FIG. S11 |
| tiling crRNA 10 | | ACGAAGGGGACTAAAACAT | TGGAATTG | CCCAAAAACGAA | | |
| | | GTTGTGTGGAATTGTGAGC | TGAGCGGA | GGGGACTAAAAC | | |
| | | GGATAAA | TAAA | | | |
| LwaCas13a | LwaCas13a | GATTTAGACTACCCCAAAA | TGCTTCCG | GATTTAGACTAC | ssRNA 1 | FIG. S11 |
| tiling crRNA 11 | | ACGAAGGGGACTAAAACTG | GCTCGTAT | CCCAAAAACGAA | | |
| | | CTTCCGGCTCGTATGTTGT | GTTGTGTG | GGGGACTAAAAC | | |
| | | GTGGAAT | GAAT | | | |
| CcaCas13b | CcaCas13b | CCCCGGGTACCGAGCTCGA | CCCCGGGT | GTTGGAACTGCT | ssRNA 1 | FIG. S11 |
| tiling crRNA 1 | | ATTCACTGGCCGTTGGAAC | ACCGAGCT | CTCATTTTGGAG | | |
| | | TGCTCTCATTTTGGAGGGT | CGAATTCA | GGTAATCACAAC | | |
| | | AATCACAAC | CTGGCC | | | |
| CcaCas13b | CcaCas13b | TATTTCTAGAGGATCCCCG | TATTTCTA | GTTGGAACTGCT | ssRNA 1 | FIG. S11 |
| tiling crRNA 2 | | GGTACCGAGCTGTTGGAAC | GAGGATCC | CTCATTTTGGAG | | |
| | | TGCTCTCATTTTGGAGGGT | CCGGGTAC | GGTAATCACAAC | | |
| | | AATCACAAC | CGAGCT | | | |
| CcaCas13b | CcaCas13b | TACCAAGTAATCCATATTT | TACCAAGT | GTTGGAACTGCT | ssRNA 1 | FIG. S11 |
| tiling crRNA 3 | | CTAGAGGATCCGTTGGAAC | AATCCATA | CTCATTTTGGAG | | |
| | | TGCTCTCATTTTGGAGGGT | TTTCTAGA | GGTAATCACAAC | | |
| | | AATCACAAC | GGATCC | | | |
| CcaCas13b | CcaCas13b | GTAGATTGCTGTTCTACCA | GTAGATTG | GTTGGAACTGCT | ssRNA 1 | FIG. S11 |
| tiling crRNA 4 | | AGTAATCCATAGTTGGAAC | CTGTTCTA | CTCATTTTGGAG | | |
| | | TGCTCTCATTTTGGAGGGT | CCAAGTAA | GGTAATCACAAC | | |
| | | AATCACAAC | TCCATA | | | |
| CcaCas13b | CcaCas13b | TGCCTGCAGGTCGAGTAGA | TGCCTGCA | GTTGGAACTGCT | ssRNA 1 | FIG. S11 |
| tiling crRNA 5 | | TTGCTGTTCTAGTTGGAAC | GGTCGAGT | CTCATTTTGGAG | | |
| | | TGCTCTCATTTTGGAGGGT | AGATTGCT | GGTAATCACAAC | | |
| | | AATCACAAC | GTTCTA | | | |
| CcaCas13b | CcaCas13b | ACGCCAAGCTTGCATGCCT | ACGCCAAG | GTTGGAACTGCT | ssRNA 1 | FIG. S11 |
| tiling crRNA 6 | | GCAGGTCGAGTGTTGGAAC | CTTGCATG | CTCATTTTGGAG | | |
| | | TGCTCTCATTTTGGAGGGT | CCTGCAGG | GGTAATCACAAC | | |
| | | AATCACAAC | TCGAGT | | | |
| CcaCas13b | CcaCas13b | CTATGACCATGATTACGCC | CTATGACC | GTTGGAACTGCT | ssRNA 1 | FIG. S11 |
| tiling crRNA 7 | | AAGCTTGCATGGTTGGAAC | ATGATTAC | CTCATTTTGGAG | | |
| | | | | GGTAATCACAAC | | |
| | | TGCTCTCATTTTGGAGGGT | GCCAAGCT | | | |
| | | AATCACAAC | TGCATG | | | |
| CcaCas13b | CcaCas 13b | AACACAGGAAACAGCTATG | AACACAGG | GTTGGAACTGCT | ssRNA 1 | FIG. S11 |
| tiling crRNA 8 | | ACCATGATTACGTTGGAAC | AAACAGCT | CTCATTTTGGAG | | |
| | | TGCTCTCATTTTGGAGGGT | ATGACCAT | | | |
| CcaCas13b | CcaCas 13b | ATTGTGAGCGGATAAACAC | ATTGTGAG | GTTGGAACTGCT | ssRNA 1 | FIG. S11 |
| tiling crRNA 9 | | AGGAAACAGCTGTTGGAAC | CGGATAAA | CTCATTTTGGAG | | |
| | | TGCTCTCATTTTGGAGGGT | CACAGGAA | | | |
| CcaCas13b | CcaCas13b | GTATGTTGTGTGGAATTGT | GTATGTTG | GTTGGAACTGCT | ssRNA 1 | FIG. S11 |
| tiling crRNA | | GAGCGGATAAAGTTGGAAC | TGTGGAAT | CTCATTTTGGAG | | |
| | | TGCTCTCATTTTGGAGGGT | TGTGAGCG | | | |
| CcaCas13b | CcaCas13b | TATGCTTCCGGCTCGTATG | TATGCTTC | GTTGGAACTGCT | ssRNA 1 | FIG. S11 |
| tiling crRNA | | TTGTGTGGAATGTTGGAAC | CGGCTCGT | CTCATTTTGGAG | | |
| | | TGCTCTCATTTTGGAGGGT | ATGTTGTG | | | |
| PsmCas13b | PsmCas13b | CCCCGGGTACCGAGCTCGA | CCCCGGGT | GTTGTAGAAGCT | ssRNA 1 | FIG. S11 |
| tiling crRNA 1 | | ATTCACTGGCCGTTGTAGA | ACCGAGCT | TATCGTTTGGAT | | |
| | | AGCTTATCGTTTGGATAGG | CGAATTCA | | | |
| PsmCas13b | PsmCas13b | TATTTCTAGAGGATCCCCG | TATTTCTA | GTTGTAGAAGCT | ssRNA 1 | FIG. S11 |
| tiling crRNA 2 | | GGTACCGAGCTGTTGTAGA | GAGGATCC | TATCGTTTGGAT | | |
| | | AGCTTATCGTTTGGATAGG | CCGGGTAC | | | |
| PsmCas13b | PsmCas13b | TACCAAGTAATCCATATTT | TACCAAGT | GTTGTAGAAGCT | ssRNA 1 | FIG. S11 |
| tiling crRNA 3 | | CTAGAGGATCCGTTGTAGA | AATCCATA | TATCGTTTGGAT | | |
| | | AGCTTATCGTTTGGATAGG | TTTCTAGA | | | |
| PsmCas13b | PsmCas13b | GTAGATTGCTGTTCTACCA | GTAGATTG | GTTGTAGAAGCT | ssRNA 1 | FIG. S11 |
| tiling crRNA 4 | | AGTAATCCATAGTTGTAGA | CTGTTCTA | TATCGTTTGGAT | | |
| | | AGCTTATCGTTTGGATAGG | CCAAGTAA | | | |
| PsmCas13b | PsmCas13b | TGCCTGCAGGTCGAGTAGA | TGCCTGCA | GTTGTAGAAGCT | ssRNA 1 | FIG. S11 |
| tiling crRNA 5 | | TTGCTGTTCTAGTTGTAGA | GGTCGAGT | TATCGTTTGGAT | | |
| | | AGCTTATCGTTTGGATAGG | AGATTGCT | | | |
| PsmCas13b | PsmCas13b | ACGCCAAGCTTGCATGCCT | ACGCCAAG | GTTGTAGAAGCT | ssRNA 1 | FIG. S11 |
| tiling crRNA 6 | | GCAGGTCGAGTGTTGTAGA | CTTGCATG | TATCGTTTGGAT | | |
| | | AGCTTATCGTTTGGATAGG | CCTGCAGG | | | |
| PsmCas13b | PsmCas13b | CTATGACCATGATTACGCC | CTATGACC | GTTGTAGAAGCT | ssRNA 1 | FIG. S11 |
| tiling crRNA 7 | | AAGCTTGCATGGTTGTAGA | ATGATTAC | TATCGTTTGGAT | | |
| | | AGCTTATCGTTTGGATAGG | GCCAAGCT | | | |
| PsmCas13b | PsmCas13b | AACACAGGAAACAGCTATG | AACACAGG | GTTGTAGAAGCT | ssRNA 1 | FIG. S11 |
| tiling crRNA 8 | | ACCATGATTACGTTGTAGA | AAACAGCT | TATCGTTTGGAT | | |
| | | AGCTTATCGTTTGGATAGG | ATGACCAT | | | |
| PsmCas13b | PsmCas13b | ATTGTGAGCGGATAAACAC | ATTGTGAG | GTTGTAGAAGCT | ssRNA 1 | FIG. S11 |
| tiling crRNA 9 | | AGGAAACAGCTGTTGTAGA | CGGATAAA | TATCGTTTGGAT | | |
| | | AGCTTATCGTTTGGATAGG | CACAGGAA | | | |
| PsmCas13b | PsmCas13b | GTATGTTGTGTGGAATTGT | GTATGTTG | GTTGTAGAAGCT | ssRNA 1 | FIG. S11 |
| tiling crRNA | | GAGCGGATAAAGTTGTAGA | TGTGGAAT | TATCGTTTGGAT | | |
| | | AGCTTATCGTTTGGATAGG | TGTGAGCG | | | |
| PsmCas13b | PsmCas13b | TATGCTTCCGGCTCGTATG | TATGCTTC | GTTGTAGAAGCT | ssRNA 1 | FIG. S11 |
| tiling crRNA | | TTGTGTGGAATGTTGTAGA | CGGCTCGT | TATCGTTTGGAT | | |
| | | AGCTTATCGTTTGGATAGG | ATGTTGTG | | | |
| ZIKV | CcaCas13b | CTTGAACTCTACCAGTGCT | CTTGAACT | GTTGGAACTGCT | ZIKV | FIG. S16B |
| CcaCas13b | | TCTTTGTTGTTGTTGGAAC | CTACCAGT | CTCATTTTGGAG | ssRNA | |
| | | TGCTCTCATTTTGGAGGGT | GCTTCTTT | | | |
| DENV crRNA | CcaCas13b | TTTGCTTCTGTCCAGTGAG | TTTGCTTC | GTTGGAACTGCT | DENV | FIG. S17A |
| CcaCas13b | | CATGGTCTTCGGTTGGAAC | TGTCCAGT | CTCATTTTGGAG | ssRNA | |
| | | TGCTCTCATTTTGGAGGGT | GAGCATGG | | | |
| human ID | | | | | | |
| rs601338 A- | PsmCas13b | CCGCTTCACCGGCTACCCC | CCGCTTCA | GTTGTAGAAGCT | Human locus | FIG. S18C |
| allele sensing | | TGCTCCAAGAGTTGTAGAA | CCGGCTAC | TATCGTTTGGAT | rs601338 | |
| | | GCTTATCGTTTGGATAGGT | CCCTGCTC | | | |
| human ID | | | | | | |
| rs601338 G- | LwaCas13a | GATTTAGACTACCCCAAAA | CTGCACCT | GATTTAGACTAC | Human locus | FIG. S18C |
| allele sensing | | ACGAAGGGGACTAAAACCT | TCTACCAC | CCCAAAAACGAA | rs601138 | |
| | | GCACCTTCTACCACCACCT | CACCTCCG | | | |
| ssRNA/ssDNA 1 | LwaCas13a | GATTTAGACTACCCCAAAA | TAGATTGC | GATTTAGACTAC | ssRNA 1 | FIG. S20 |
| | | ACGAAGGGGACTAAAACTA | TGTTCTAC | CCCAAAAACGAA | | |
| | | | | GGGGACTAAAAC | | |
| | | GATTGCTGTTCTACCAAGT | CAAGTAAT | | | |
| | | AATCCAT | CCAT | | | |
| | | | | | EGFR | |
| | | | | | T790M | |
| T790M | LwaCas13a | GATTTAGACTACCCCAAAA | GCAAGATG | GATTTAGACTAC | mutant | FIG. S24 |
| mutant | | ACGAAGGGGACTAAAACGC | AGCTGCAC | CCCAAAAACGAA | synthetic | |
| | | AAGATGAGCTGCACGGTGG | GGTGGAGG | | | |
| | | | | | EGFR | |
| | | | | | T790M | |
| T790M wild | LwaCas13a | GATTTAGACTACCCCAAAA | GCGTCATG | GATTTAGACTAC | WT | FIG. S24 |
| type sensing | | ACGAAGGGGACTAAAACGC | AGCTGCAC | CCCAAAAACGAA | synthetic | |
| | | GTCATGAGCTGCACGGTGG | GGTGGAGG | | | |
| ssRNA 3 | PsmCas13b | TAGATTGCTGTTCTACCAA | TAGATTGC | GTTGTAGAAGCT | ssRNA 3 | FIG. S25 |
| (PsmCas13b | | GTAATCCATATGTTGTAGA | TGTTCTAC | TATCGTTTGGAT | | |
| | | AGCTTATCGTTTGGATAGG | CAAGTAAT | | | |
| ssRNA 2 | LwaCas13a | GATTTAGACTACCCCAAAA | GATTGCTG | GATTTAGACTAC | ssRNA 2 | FIG. S25 |
| (LwaCas13a | | ACGAAGGGGACTAAAACGA | TTCTACCA | CCCAAAAACGAA | | |
| | | TTGCTGTTCTACCAAGTAA | AGTAATCC | | | |

TABLE 23
RNA and DNA Targets Used in this Study.

| Name | Sequence | Nucleic acid | 1st FIG. |
|---|---|---|---|
| DENV ssRNA (SEQ ID NO: 864) | AGUACAUAUUCAGGGGCCAACCUCUCAACAAUGACGAAGACCAUGCUC | RNA | FIG. 1B |
| | ACUGGACAGAAGCAAAAAUGCUGCUGGACAACAUCAACACACCAGAAG | | |
| | GGAUUAUACCAGCUCUCUUUGAACCAGAAAGGGAGAAGUCAGCCGCCA | | |
| | UAGACGGUGAAUACCGCCUGAAGGGU | | |
| ssDNA 1 (SEQ ID NO: 865) | GGCCAGTGAATTCGAGCTCGGTACCCGGGGATCCTCTAGAAATATGGA | DNA | FIG. 1F |
| | TTACTTGgtAGAACAGCAATCTACTCGACCTGCAGGCATGCAAGCTTG | | |
| | GCGTAATCATGGTCATAGCTGTTTCCTGTGTTTATCCGCTCACAATTC | | |
| | CACACAACATACGAGCCGGAAGCATAAAG | | |
| ZIKV ssRNA (SEQ ID NO: 866) | GACACCGGAACUCCACACUGGAACAACAAAGAAGCACUGGUAGAGUUC | RNA | FIG. 1F |
| | AAGGACGCACAUGCCAAAAGGCAAACUGUCGUGGUUCUAGGGAGUCAA | | |
| | GAAGGAGCAGUUCACACGGCCCUUGCUGGAGCUCUGGAGGCUGAGAUG | | |
| | GAUGGUGCAAAGGGAAGGCUGUCCUCUGGC | | |
| Thermonuclease ssDNA | TTAATTAAAGCGATTGATGGTGATACTGTTAAATTAATGTACAAAGGT | DNA | FIG. 1H |
| (SEQ ID NO: 867) | CAACCAATGACATTCAGACTATTATTGGTTGATACACCTGAAACAAAG | | |
| | CATCCTAAAAAAGGTGTAGAGAAATATGGTCCTGAAGCAAGTGCATTT | | |
| | ACGAAAAAGATGGTAGAAAATGCAAAGAAAATTGAAGTCGAGTTTG | | |
| Acyltransferase ssDNA | GGGGAGGATGTCGGGCGCGCACGTTTTCCCTTCGCTGAGCACGCTGCG | DNA | FIG. 1H |
| (SEQ ID NO: 868) | CGCGTCGCCTACGTGAATGCGCTGTTCGATGCGTTGGCCGAAGGCAAC | | |
| | CCGCGGGTGAGCGTGCTCGACCCCTCCAGCGTGCTCTGCGATGGCCTG | | |
| | GATTGTTTCGCCGAACGTGATGGCTGGTCGCTGTACATGGATAACA | | |
| ssRNA 1 (SEQ ID NO: 869) | GGCCAGUGAAUUCGAGCUCGGUACCCGGGGAUCCUCUAGAAAUAUGGA | RNA | FIG. S3 |
| | UUACUUGgUAGAACAGCAAUCUACUCGACCUGCAGGCAUGCAAGCUUG | | |
| | GCGUAAUCAUGGUCAUAGCUGUUUCCUGUGUUUAUCCGCUCACAAUUC | | |
| | CACACAACAUACGAGCCGGAAGCAUAAAG | | |
| Random motif library | TTCCTGTGAAGCTAAAGAAGGAGAATGrNrNrNrNrNrNTATTGATAG | Mixed | FIG. S12 |
| (SEQ ID NO: 870) | CAGCTGTGGCACCTGCAC | DNA/RNA | |
| EGFR Exon19 deletion | TGCCAGTTAACGTCTTCCTTCTCTCTCTGTCATAGGGACTCTGGATCC | DNA | FIG. S24A |
| mutant synthetic ssDNA | CAGAAGGTGAGAAAGTTAAAATTCCCGTCGCTATCAAGACATCTCCGA | | |
| (SEQ ID NO: 871) | AAGCCAACAAGGAAATCCTCGATGTGAGTTTCTGCTTTGCTGTGTGGG | | |
| | GGTCCATGGCTCTGAACCTCAGGCCCACCTTTTCTCAT | | |
| EGFR Exon19 deletion WT | TGCCAGTTAACGTCTTCCTTCTCTCTCTGTCATAGGGACTCTGGATCC | DNA | FIG. S24A |
| synthetic ssDNA | CAGAAGGTGAGAAAGTTAAAATTCCCGTCGCTATCAAGGAATTAAGAG | | |
| (SEQ ID NO: 872) | AAGCAACATCTCCGAAAGCCAACAAGGAAATCCTCGATGTGAGTTTCT | | |
| | GCTTTGCTGTGTGGGGGTCCATGGCTCTGAACCTCAGGCCCACCTTTT | | |
| | CTCAT | | |
| EGFR T790M mutant | CCTCCCTCCAGGAAGCCTACGTGATGGCCAGCGTGGACAACCCCCACG | DNA | FIG. S24E |
| synthetic ssDNA | TGTGCCGCCTGCTGGGCATCTGCCTCACCTCCACCGTGCAGCTCATCA | | |
| (SEQ ID NO: 873) | TGCAGCTCATGCCCTTCGGCTGCCTCCTGGACTATGTCCGGGAACACA | | |
| | AAGACAATATTGGCTCCCAGTACCTGCTCAACTGGTGTGTGCAGATCG | | |
| | CA | | |
| EGFR T790M WT synthetic | CCTCCCTCCAGGAAGCCTACGTGATGGCCAGCGTGGACAACCCCCACG | DNA | FIG. S24E |
| ssDNA | TGTGCCGCCTGCTGGGCATCTGCCTCACCTCCACCGTGCAGCTCATCA | | |
| (SEQ ID NO: 874) | CGCAGCTCATGCCCTTCGGCTGCCTCCTGGACTATGTCCGGGAACACA | | |
| | AAGACAATATTGGCTCCCAGTACCTGCTCAACTGGTGTGTGCAGATCG | | |
| | CA | | |
| ssRNA 2 (LwaCas13a target) | UAGGUGUUCCACAGGGUAGCCAGCAGCAUCCUGCGAUGCAAAUAUGGA | RNA | FIG. S25B |
| (SEQ ID NO: 875) | UUACUUGGUAGAACAGCAAUCUAAUCCGGAACAUAAUGGUGCAGGGCG | | |
| | CUGACUUCCGCGUUUGUUUUAAAUCAAACACGGAAACCGAAGACCAUU | | |
| | CAUGUUGUUGCUGCCGGAAGCAUAAAG | | |
| ssRNA 3 (PsmCas13b target) | UAGGUGUUCCACAGGGUAGCCAGCAGCAUCCUGCGAUGCAAAUAUGGA | RNA | FIG. 525B |
| (SEQ ID NO: 876) | UUACUUGGUAGAACAGCAAUCUAAUCCGGAACAUAAUGGUGCAGGGCG | | |
| | CUGACUUCCGCGUUUGAAAAAAAACAAACACGGAAACCGAAGACCAUU | | |
| | CAUGUUGUUGCUGCCGGAAGCAUAAAG | | |

TABLE 24
RPA Primers Used in this Study. Shown are SEQ ID NO: 877-906, with SEQ ID NO: 877,
878, and 879 representing the forward primer sequence, forward primer sequence
(with T7 RNAP promoter), and reverse primer sequence, respectively, etc.

| | | Forward primer sequence | Reverse primer | |
|---|---|---|---|---|
| Target | Forward primer sequence | (with T7 RNAP promoter) | sequence | 1st FIG. |
| DENV | GTACATATTCAGGGGCCAACCTC | gaaattaatacgactcactataggg | TTTCTGGTTCAAAG | FIG. 1D |
| ssRNA | TC | GTACATATTCAGGGGCCAACCTCTC | AGAGCTGGTAT | |
| Thermonuclease | TGTACAAAGGTCAACCAATGACA | gaaatTAATACGACTCACTATAGGG | TGCACTTGCTTCAG | FIG. 1H |
| ssDNA | TTCAG | TGTACAAAGGTCAACCAATGACATT | GACCATATTTC | |
| | | CAG | | |
| Acyltransferase | CTACGTGAATGCGCTGTTCGATG | gaaatTAATACGACTCACTATAGGG | GAAACAATCCAGGC | FIG. 1H |
| | CTACGTGAATGCGCTGTTCGATG | CATCGCAGAG | | |
| EGFR | TCTGGATCCCAGAAGGTGAGAAA | gaaatTAATACGACTCACTATAGGG | CCACACAGCAAAGC | FIG. 3E |
| L858R | GTTAAAA | TCTGGATCCCAGAAGGTGAGAAAGT | AGAAACTCACATCG | |
| | | TAAAA | AG | |
| EGFR | TCTGGATCCCAGAAGGTGAGAAA | gaaatTAATACGACTCACTATAGGG | CCACACAGCAAAGC | FIG. 3H |
| Exon19 | GTTAAAA | TCTGGATCCCAGAAGGTGAGAAAGT | AGAAACTCACATCG | |
| deletion | | TAAAA | AG | |
| Theranostic | AGGGCCGCCACTCCACCGGCGGC | gaaatTAATACGACTCACTATAGGG | GAAGAGTTCTTCAC | FIG. 5B |
| APC | ATGGATGAG | AGGGCCGCCACTCCACCGGCGGCAT | CTTTACTCACggaT | |
| target | | GGATGAG | CCtcc | |
| (NM_000038.5) | | | | |
| ZIKV | CCACACTGGAACAACAAAGAAGC | gaaatTAATACGACTCACTATAGGG | ACAGCCTTCCCTTT | FIG. S6 |
| ssRNA | AC | CCACACTGGAACAACAAAGAAGCAC | GCACCATCCATCTC | |
| | | | AG | |
| locus | ATAGTCCCCTCGGCGAACATGGA | gaaattaatacgactcactataggg | GAGTACGTCCGCTT | FIG. S18C |
| rs601338 | CCCCTACAA | ATAGTCCCCTCGGCGAACATGGACC | CACCGGCTACCCCT | |
| | | CCTACAA | GCTC | |
| ssDNA/ssRNA 1 | ATCCTCTAGAAATATGGATTACT | AATTCTAATACGACTCACTATAGGG | GATAAACACAGGAA | FIG. S20 |
| | TGGTAGAACAG | ATCCTCTAGAAATATGGATTACTTG | ACAGCTATGACCAT | |
| | | GTAGAACAG | GATTAGG | |
| EGFR | CCCCACGTGTGCCGCCTGCTGGG | gaaatTAATACGACTCACTATAGGG | ATATTGTCTTTGTG | FIG. S24E |
| T790M | CATCTGC | CCCCACGTGTGCCGCCTGCTGGGCA | TTCCCGGACATAGT | |
| | | TCTGC | CC | |

TABLE 25
Cleavage Reporters Used in this Study.

| Name | Sequence | Fluorophore | 1st FIG. |
|---|---|---|---|
| poly U reporter | /56-FAM/rUrUrUrUrU/3IABkFQ/ | FAM | FIG. 1 |
| | (SEQ ID NO: 907) | | |
| poly A reporter | /56-FAM/rArArArArA/3IABkFQ/ | FAM | FIG. 1 |
| | (SEQ ID NO: 908) | | |
| poly U reporter for | /5HEX/rUrUrUrUrU/3IABkFQ/ | HEX | FIG. 1 |
| multiplexing | (SEQ ID NO: 909) | | |
| rArA reporter for testing di- | /56-FAM/TArArAGC/3IABkFQ/ | FAM | FIG. 1 and FIG. |
| base preference | (SEQ ID NO: 910) | | S7 |
| rArU reporter for testing di- | /56-FAM/TArArUGC/3IABkFQ/ | FAM | FIG. 1 and FIG. |
| base preference | (SEQ ID NO: 911) | | S7 |
| rArC reporter for testing di- | /56-FAM/TArArCGC/3IABkFQ/ | FAM | FIG. 1 and FIG. |
| base preference | (SEQ ID NO: 912) | | S7 |
| rArG reporter for testing di- | /56-FAM/TArArGGC/3IABkFQ/ | FAM | FIG. 1 and FIG. |
| base preference | (SEQ ID NO: 913) | | S7 |
| rUrA reporter for testing di- | /56-FAM/TArUrAGC/3IABkFQ/ | FAM | FIG. 1 and FIG. |
| base preference | (SEQ ID NO: 914) | | S7 |
| rUrU reporter for testing di- | /56-FAM/TArUrUGC/3IABkFQ/ | FAM | FIG. 1 and FIG. |
| base preference | (SEQ ID NO: 915) | | S7 |
| rUrC reporter for testing di- | /56-FAM/TArUrCGC/3IABkFQ/ | FAM | FIG. 1 and FIG. |
| base preference | (SEQ ID NO: 916) | | S7 |
| rUrG reporter for testing di- | /56-FAM/TArUrGGC/3IABkFQ/ | FAM | FIG. 1 and FIG. |
| base preference | (SEQ ID NO: 917) | | S7 |
| rCrA reporter for testing di- | /56-FAM/TArCrAGC/3IABkFQ/ | FAM | FIG. 1 and FIG. |
| base preference | (SEQ ID NO: 918) | | S7 |
| rCrU reporter for testing di- | /56-FAM/TArCrUGC/3IABkFQ/ | FAM | FIG. 1 and FIG. |
| base preference | (SEQ ID NO: 919) | | S7 |
| rCrC reporter for testing di- | /56-FAM/TArCrCGC/3IABkFQ/ | FAM | FIG. 1 and FIG. |
| base preference | (SEQ ID NO: 920) | | S7 |
| rCrG reporter for testing di- | /56-FAM/TArCrGGC/3IABkFQ/ | FAM | FIG. 1 and FIG. |
| base preference | (SEQ ID NO: 921) | | S7 |
| rGrA reporter for testing di- | /56-FAM/TArGrAGC/3IABkFQ/ | FAM | FIG. 1 and FIG. |
| base preference | (SEQ ID NO: 922) | | S7 |
| rGrU reporter for testing di- | /56-FAM/TArGrUGC/3IABkFQ/ | FAM | FIG. 1 and FIG. |
| base preference | (SEQ ID NO: 923) | | S7 |
| rGrC reporter for testing di- | /56-FAM/TArGrCGC/3IABkFQ/ | FAM | FIG. 1 and FIG. |
| base preference | (SEQ ID NO: 924) | | S7 |
| rGrG reporter for testing di- | /56-FAM/TArGrGGC/3IABkFQ/ | FAM | FIG. 1 and FIG. |
| base preference | (SEQ ID NO: 925) | | S7 |
| poly U Cy5 for multiplexing | /5Cy5/rUrUrUrUrU/3IAbRQSp/ | FAM | FIG. 1 |
| | (SEQ ID NO: 926) | | |
| Lateral flow reporter with | /56- | N/A | FIG. 3 |
| FAM/Biotin | FAM/mArArUrGrGrCmAmArArUrGrGrCmA/ | | |
| | 3 Bio/ | | |
| | (SEQ ID NO: 927) | | |
| poly C reporter | /56-FAM/rCrCrCrCrC/3IABkFQ/ | FAM | FIG. S3 |
| | (SEQ ID NO: 928) | | |
| poly G reporter | /56-FAM/rGrGrGrGrG/3IABkFQ/ | FAM | FIG. S3 |
| | (SEQ ID NO: 929) | | |
| RNA motif library for base | TTCCTGTGAAGCTAAAGAAGGAGAATGr | N/A | FIG. S12 |
| preference screening | NrNrNr | | |
| | NrNrNTATTGATAGCAGCTGTGGCACCTG | | |
| | CAC | | |
| | (SEQ ID NO: 930) | | |
| LwaCas13a validation motif | /56-FAM/TrGrUrUrUrUrC/3IABkFQ/ | FAM | FIG. S13 |
| 1 | (SEQ ID NO: 931) | | |
| LwaCas13a validation motif | /56-FAM/TrUrUrUrUrUrC/3IABkFQ/ | FAM | FIG. S13 |
| 2 | (SEQ ID NO: 932) | | |
| LwaCas13a validation motif | /56-FAM/TrCrArUrUrUrG/3IABkFQ/ | FAM | FIG. S13 |
| 3 | (SEQ ID NO: 933) | | |
| PsmCas13b validation motif | /56-FAM/TrUrArUrUrGrA/3IABkFQ/ | FAM | FIG. S13 |
| 1 | (SEQ ID NO: 934) | | |
| PsmCas13b validation motif | /56-FAM/TrArUrUrGrArU/3IABkFQ/ | FAM | FIG. S13 |
| 2 | (SEQ ID NO: 935) | | |
| PsmCas13b validation motif | /56-FAM/TrUrUrGrArUrA/3IABkFQ/ | FAM | FIG. S13 |
| 3 | (SEQ ID NO: 936) | | |
| CcaCas13b validation motif | /56-FAM/TrUrUrUrGrUrU/3IABkFQ/ | FAM | FIG. S13 |
| 1 | (SEQ ID NO: 937) | | |
| CcaCas13b validation motif | /56-FAM/TrUrGrUrUrUrU/3IABkFQ/ | FAM | FIG. S13 |
| 2 | (SEQ ID NO: 938) | | |
| CcaCas13b validation motif | /56-FAM/TrArUrUrUrUrU/3IABkFQ/ | FAM | FIG. S13 |
| 3 | (SEQ ID NO: 939) | | |
| Lwa orthogonal motif 1 | /56-FAM/TrCrGrArArUrG/3IABkFQ/ | FAM | FIG. S14 |
| | (SEQ ID NO: 940) | | |
| Lwa orthogonal motif 2 | /56-FAM/TrGrUrCrUrCrC/3IABkFQ/ | FAM | FIG. S14 |
| | (SEQ ID NO: 941) | | |
| Lwa orthogonal motif 3 | /56-FAM/TrGrCrArUrGrA/3IABkFQ/ | FAM | FIG. S14 |
| | (SEQ ID NO: 942) | | |
| Lwa orthogonal motif 4 | /56-FAM/TrCrArUrArCrA/3IABkFQ/ | FAM | FIG. S14 |
| | (SEQ ID NO: 943) | | |
| Lwa orthogonal motif 5 | /56-FAM/TrCrArUrArCrG/3IABkFQ/ | FAM | FIG. S14 |
| | (SEQ ID NO: 944) | | |
| Lwa orthogonal motif 6 | /56-FAM/TrGrCrArUrArA/3IABkFQ/ | FAM | FIG. S14 |
| | (SEQ ID NO: 945) | | |
| CcaCas13b orthogonal motif | /56-FAM/TrCrUrArCrUrU/3IABkFQ/ | FAM | FIG. S14 |
| 1 | (SEQ ID NO: 946) | | |
| CcaCas13b orthogonal motif | /56-FAM/TrCrUrArCrGrU/3IABkFQ/ | FAM | FIG. S14 |
| 2 | (SEQ ID NO: 947) | | |
| CcaCas13b orthogonal motif | /56-FAM/TrUrUrArArArC/3IABkFQ/ | FAM | FIG. S14 |
| 3 | (SEQ ID NO: 948) | | |
| gold nanoparticle linker | /5ThioMC6- | N/A | FIG. S21 |
| | D/rCrUrCrCrCrUrArArUrArArCrArArUrU | | |
| | rUrArUrArArCrUrArUrUrCrCrUrArCrCrC | | |
| | rUrUrUrCrCrCrArArArArArArA/3ThioMC | | |
| | 3-D/ | | |
| | (SEQ ID NO: 949) | | |
| magnetic bead conjugate | /5AmMC12/AGAGCATCACCATGATCCTGr | N/A | FIG. S22 |
| oligo | UrUr | | |
| | UrUrUrUrUrUTG/iBiodT/CTCGGAT | | |
| | ATCTCGACTA/36-FAM/ | | |
| | (SEQ ID NO: 950) | | |
| EiCsm6 validation motif 1 | /56-FAM/TrGrArCrGrUrG/3IABkFQ/ | N/A | FIG. S29 |
| | (SEQ ID NO: 951) | | |
| short poly A for lateral flow | /FamCE/rArArArArArA/BioBB/ | N/A | FIG. S34A |
| | (SEQ ID NO: 952) | | |
| long poly A for lateral flow | /FamCE/rArArArArArArArArArArArA/BioBB/ | N/A | FIG. S34A |
| | (SEQ ID NO: 953) | | |
| short poly C for lateral flow | /56-FAM/rCrCrCrCrCrC/3Bio/ | N/A | FIG. S34A |
| | (SEQ ID NO: 954) | | |
| long poly C for lateral flow | /56- | N/A | FIG. S34A |
| | FAM/rCrCrCrCrCrCrCrCrCrCrCrC/3Bio/ | | |
| | (SEQ ID NO: 955) | | |
| short poly A/C for lateral | /56-FAM/rArCrArCrArC/3Bio/ | N/A | FIG. S34A |
| flow | (SEQ ID NO: 956) | | |
| long poly A/C for lateral | /56- | N/A | FIG. S34A |
| flow | FAM/rArCrArCrArCrArCrArCrArC/3Bio/ | | |
| | (SEQ ID NO: 133) | | |

TABLE 26
REPAIR plasmids used in this study

| Plasmid Name | Description | Link to plasmid map |
|---|---|---|
| REPAIR plasmid | CMV-dPspCas13b-GS- | https://benchling.com/s/seq- |
| (pC0039) | ADAR2DD(E488Q) | arzpsupZEzGu3ghBDhtv |
| APC wildtype plasmid | pCMV-mScarlett-APC | https://benchling.com/s/seq- |
| | WT-EGFP | w2vU03gnxfuxK4OjSxiT |
| APC mutant plasmid | pCMV-mScarlett-APC | https://benchling.com/s/seq- |
| | mutant-EGFP | LlmQkX8dJ4sBoZfooxHy |
| REPAIR guide | U6-guide-PspCas13b | https://benchling.com/s/seq- |
| (in pC0043) | DR | OLVAsGt655E7pTACczl1 |
| REPAIR nontargeting | U6-nontargeting guide- | https://benchling.com/s/seq- |
| guide (pC0052) | PspCas13b DR | U9gHnOW41C1DVUBGQypw |

[0710] Using these unique cleavage preferences, we were able to detect synthetic Zika virus (ZIKV) 80 ssRNA in the HEX channel and synthetic Dengue virus (DENV) ssRNA in the FAM channel in the same reaction (FIG. 133). To expand the in-sample multiplexing capabilities of SHERLOCK, we engineered a detection system based on Cas12a, which also exhibits collateral activity (Chen et al. bioRxiv (2017)) (FIG. 125C). Although AsCas12a collateral activity did not produce a detectable signal at input concentrations below 100 nM, preamplification with recombinase polymerase amplification (RPA) enabled single-molecule detection at 2 aM (FIG. 125D, 134) (unless otherwise noted, all SHERLOCK reactions that involve a pre-amplification are performed in two steps with the RPA reaction being directly added into the Cas13 assay without any purification step). For triplex detection, we designed a LwaCas13a uridine reporter in the Cy5 channel, a PsmCas13b adenine reporter in the FAM channel, and an AsCas12a ssDNA reporter in the HEX channel (FIG. 135A). We were able to detect three targets (a synthetic ssDNA target, ZIKV ssRNA, and DENV ssRNA) in a single reaction (FIG. 135B). We further extended detection to four targets by leveraging orthogonal dinucleotide motifs, with reporters for LwaCas13a, PsmCas13b, CcaCas13b, and AsCas12a in FAM, TEX, Cy5, and HEX channels, respectively (FIG. 125E), and were able to distinguish all combinations of targets (FIG. 125F). When combined with RPA, we detected two DNA targets (the P. aeruginosa acyltransferase gene and the S. aureus thermonuclease gene) (FIG. 125G) down to the attomolar range (FIG. 125H). Similarly, multiplexed SHERLOCK with PsmCas13b and LwaCas13a achieved attomolar multiplexed detection of ZIKV and DENV RNA dilutions as well as allele specific genotyping of human saliva samples (FIG. 136). These advances in in-sample multiplexing via orthogonal base preferences allow for many targets to be detected at scale and for cheaper cost.

[0711] We next focused on tuning the output of the SHERLOCK signal to make it more quantitative, sensitive, and robust to broaden the utility of the technology. SHERLOCK relies on an exponential pre-amplification, which saturates quickly and hinders accurate quantitation, but we observed that more dilute primer concentrations increased both raw signal and quantitative accuracy, indicating that at lower primer concentrations, the reaction does not saturate (FIG. 137,B and FIG. 138A-E). We tested a range of primer concentrations and found that 240 nM exhibited the greatest correlation between signal and input (FIG. 138F), and quantification was sustainable across a large range of sample concentrations down to the attomolar range (FIG. 137C and FIG. 138G). Many applications of nucleic acid detection, such as HIV detection (W.H. Organization in Guidelines for Using HIV Testing Technologies in Surveillance: Selection, Evaluation and Implementation: 2009 Update (Geneva, 2009); Barletta et al. Am J Clin Pathol 122:20-27 (2004)), require single molecule/mL sensitivity, and we therefore tested if the detection limit could be pushed beyond 2 aM, allowing for more dilute sample inputs into SHERLOCK. By scaling up the pre-amplification RPA step, we found that LwaCas13a could give detection signal for 200, 80, and 8 zM input samples and allow for single molecule volume inputs of 250 μL and 540 μL (FIG. 139A-B), and PsmCas13b could detect 200 zM input samples in 250 μL reactions (FIG. 139C).

[0712] Finally, we applied SHERLOCKv2 in a simulated approach that involves Cas13 serving as both a companion diagnostic and the therapy itself, as Cas13 has been developed for a variety of applications in mammalian cells including RNA knockdown, imaging, and editing (Abudayyeh et al. Nature 550:280-284 (2017); Cox et al. Science 358:1019-1027 (2017)) (FIG. 140A and Table 26). We recently harnessed Cas13b from Prevotella sp. P5-125 (PspCas13b) to correct mutations in genetic diseases using a system called RNA Editing for Programmable A-to-I Replacement (REPAIR) (Cox et al. Science 358:1019-1027 (2017)). To direct and monitor the outcome of a treatment, we tested if SHERLOCK could be used both for genotyping to guide the REPAIR treatment and as a readout of the edited RNA to track the efficiency of the therapy. We used a mutation in APC (APC:c.1262G>A) implicated in Familial adenomatous polyposis 1 (FIG. 140B,C) (Cottrell et al. Lancet 340:626-630 (1992)), and transfected synthetic healthy and mutant cDNAs of the fragment surrounding the mutation into HEK293FT cells. We harvested DNA from these cells and successfully genotyped the correct samples using single-sample multiplexed SHERLOCK with LwaCas13a and PsmCas13b (FIG. 140D). Concurrently, we designed and cloned guide RNAs for the REPAIR system and transfected cells that had the diseased genotype with the guide RNA and dPspCas13b-ADAR2dd(E488Q) REPAIR system. We confirmed editing by next-generation sequencing (NGS) analysis, finding that 43% editing was achieved with the REPAIR system (FIG. 140E), and we were able to detect this editing with SHERLOCK (FIG. 140F and FIG. 141).

[0713] The additional refinements presented here for Cas13-based detection allow for quantitative, visual, more sensitive, and multiplexed readouts, enabling additional applications for nucleic acid detection, especially in settings where portable and instrument-free analysis are necessary (Table 27). SHERLOCKv2 can be used for multiplexed genotyping to inform pharmacogenomics therapeutic development and application, detecting genetically modified organisms in the field, or determining the presence of co-occurring pathogens. Moreover, the rapid, isothermal readout of SHERLOCKv2, enabled by lateral flow and Csm6, provides an opportunity for detection in settings where power or portable readers are unavailable, even for rare species like circulating DNA. In the future, it might be possible to make solution-based colorimetric readouts and multiplex lateral flow assays containing multiple test strips for different targets. Improved CRISPR-dx nucleic acid tests make it easier to detect the presence of nucleic acids in a range of applications across biotechnology and health and are now field-ready for rapid and portable deployment.

TABLE 27
Comparison of SHERLOCKv1 and SHERLOCKv2.

| Characteristic | SHERLOCKv1 | SHERLOCKv2 |
|---|---|---|
| Sensitivity | 2aM | 8zM |
| Specificity | Single-nucleotide | Single-nucleotide |
| In-sample multiplexing | Single | Up to four targets |
| Spatial multiplexing | Unlimited | Unlimited |
| Speed | 2 hours | 30 minutes (from crude |
| | | sample to detection) |
| Readouts | Fluorescence | Fluorescence, visual |
| | | by lateral flow |
| Signal amplification | None | Csm6 enhancement |
| Cost | <$0.60 | <$0.60 |
| Companion diagnostic | None | Paired with |
| Nuclease compatibility | Cas13a | Cas13a, Cas13b, |

### Methods

[0714] Protein expression and purification of Cas13 and Csm6 orthologs. LwaCas13a expression and purification was carried out as described before (Gootenberg et al. Science 356:438-442 (2017)) with minor modifications and is detailed below. LbuCas13a, LbaCas13a, Cas13b and Csm6 orthologs were expressed and purified with a modified protocol. In brief, bacterial expression vectors were transformed into Rosetta™ 2(DE3)pLysS Singles Competent Cells (Millipore). A 12.5 mL starter culture was grown overnight in Terrific Broth 4 growth media (Sigma) (TB), which was used to inoculate 4 L of TB for growth at 37° C. and 300 RPM until an OD600 of 0.5. At this time, protein expression was induced by supplementation with IPTG (Sigma) to a final concentration of 500 μM, and cells were cooled to 18° C. for 16 h for protein expression. Cells were then centrifuged at 5000 g for 15 min at 4° C. Cell pellet was harvested and stored at −80° C. for later purification.

[0715] All subsequent steps of the protein purification were performed at 4° C. Cell pellet was crushed and resuspended in lysis buffer (20 mM Tris-HCl, 500 mM NaCl, 1 mM DTT, pH 8.0) supplemented with protease inhibitors (Complete Ultra EDTA-free tablets), lysozyme 500m/1 ml), and benzonase followed by high-pressure cell disruption using the LM20 Microfluidizer system at 27,000 PSI. Lysate was cleared by centrifugation for 1 hr at 4° C. at 10,000 g. The supernatant was applied to 5 mL of StrepTactin Sepharose (GE) and incubated with rotation for 1 hr followed by washing of the protein-bound StrepTactin resin three times in lysis buffer. The resin was resuspended in SUMO digest buffer (30 mM Tris-HCl, 500 mM NaCl 1 mM DTT, 0.15% Igepal (NP-40), pH 8.0) along with 250 Units of SUMO protease (250 mg/ml) and incubated overnight at 4° C. with rotation. The suspension was applied to a column for elution and separation from resin by gravity flow. The resin was washed two times with 1 column volume of Lysis buffer to maximize protein elution. The elute was diluted in cation exchange buffer (20 mM HEPES, 1 mM DTT, 5% glycerol, pH 7.0; pH 7.5 for LbuCas13a, LbaCas13a, EiCsm6, LsCsm6, TtCsm6) to lower the salt concentration in preparation for cation exchange chromatography to 250 mM.

[0716] For cation exchange and gel filtration purification, protein was loaded onto a 5 mL HiTrap SP HP cation exchange column (GE Healthcare Life Sciences) via FPLC (AKTA PURE, 3 GE Healthcare Life Sciences) and eluted over a salt gradient from 250 mM to 2M NaCl in elution buffer (20 mM HEPES, 1 mM DTT, 5% glycerol, pH 7.0; pH 7.5 for LbuCas13a, LbaCas13a). The resulting fractions were tested for presence of recombinant protein by SDS-PAGE, and fractions containing the protein were pooled and concentrated via a Centrifugal Filter Unit (Millipore 50MWCO) to 1 mL in 5200 buffer (10 mM HEPES, 1 M NaCl, 5 mM MgCl2, 2 mM DTT, pH 7.0). The concentrated protein was loaded onto a gel filtration column (Superdex® 200 Increase 10/300 GL, GE Healthcare Life Sciences) via FPLC. The resulting fractions from gel filtration were analyzed by SD S-PAGE and fractions containing protein were pooled and buffer exchanged into Storage Buffer (600 mM NaCl, 50 mM Tris-HCl pH 7.5, 5% glycerol, 2 mM DTT) and frozen at −80° C. for storage.

[0717] Accession numbers and plasmid maps for all proteins purified in this study are available in Table 21.

[0718] Nucleic acid target and crRNA preparation. Nucleic acid targets for Cas12a and genomic DNA detection were PCR amplified with NEBNext PCR master mix, gel extracted, and purified using MinElute gel extraction kit (Qiagen). For RNA based detection, purified dsDNA was incubated with T7 polymerase overnight at 30° C. using the HiScribe T7 Quick High Yield RNA Synthesis kit (New England Biolabs) and RNA was purified with the MEGAclear Transcription Clean-up kit (Thermo Fisher).

[0719] crRNA preparation was carried out as described before (Gootenberg et al. Science 356:438-442 (2017)) with minor modifications and is detailed below. For preparation of crRNAs, constructs were ordered as ultramer DNA (Integrated DNA Technologies) with an appended T7 promoter sequence. crRNA DNA was annealed to a short T7 primer (final concentrations 10 uM) and incubated with T7 polymerase overnight at 37° C. using the HiScribe T7 Quick High Yield RNA Synthesis kit (New England Biolabs). crRNAs were purified using RNAXP clean beads (Beckman 4 Coulter) at 2× ratio of beads to reaction volume, with an additional 1.8× supplementation of isopropanol (Sigma).

[0720] All crRNA sequences used in this study are available in Table 22. All DNA and RNA target sequences used in this study are available in Table 23.

[0721] Primers for RPA were designed using NCBI Primer-BLAST (Ye et al. BMC Bioinformatics 13:134 (2012)) using default parameters, with the exception of amplicon size (between 100 and 140 nt), primer melting temperatures (between 54° C. and 67° C.), and primer size (between 30 and 35 nt). Primers were then ordered as DNA (Integrated DNA Technologies).

[0722] RPA and RT-RPA reactions run were as instructed with TwistAmp® Basic or TwistAmp® Basic RT (TwistDx), respectively, with the exception that 280 mM MgAc was added prior to the input template. Reactions were run with 1 μL of input for 1 hr at 37° C., unless otherwise described.

[0723] For SHERLOCK quantification of nucleic acid, RPA primer concentration tested at standard concentration (480 nM final) and lower (240 nM, 120 nM, 60 nM, 24 nM) to find the optimum concentration. RPA reactions were further run for 20 minutes.

[0724] When multiple targets were amplified with RPA, primer concentration was adjusted to a final concentration of 480 nM. That is, 120 nM of each primer for two primer pairs were added for duplex detection.

[0725] All RPA primers used in this study are available in Table 24.

[0726] Fluorescent Cleavage Assay. Detection assays were carried out as described before (Gootenberg et al. Science 356:438-442 (2017)) with minor modifications and the procedure is detailed below. Detection assays were performed with 45 nM purified Cas13, 22.5 nM crRNA, quenched fluorescent RNA reporter (125 nM RNAse Alert v2, Thermo 5 Scientific, homopolymer and di-nucleotide reporters (IDT); 250 nM for polyA Trilink reporter), 0.5 μL murine RNase inhibitor (New England Biolabs), 25 ng of background total human RNA (purified from HEK293FT culture), and varying amounts of input nucleic acid target, unless otherwise indicated, in nuclease assay buffer (20 mM HEPES, 60 mM NaCl, 6 mM MgCl2, pH 6.8). For Csm6 fluorescent cleavage reactions, protein was used at 10 nM final concentration along with 500 nM of 2′, 3′ cyclic phosphate oligoadenylate, 250 nM of fluorescent reporter, and 0.5 μL murine RNase inhibitor in nuclease assay buffer (20 mM HEPES, 60 mM NaCl, 6 mM MgCl2, pH 6.8). Reactions were allowed to proceed for 1-3 hr at 37° C. (unless otherwise indicated) on a fluorescent plate reader (BioTek) with fluorescent kinetics measured every 5 min. In reactions involving AsCas12a, 45 nM AsCas12a was included using recombinant protein from IDT. In the case of multiplexed reactions, 45 nM of each protein and 22.5 nM of each crRNA was used in the reaction.

[0727] All cleavage reporters used in this study are available in Table 25.

[0728] SHERLOCK nucleic acid detection. Detection assays were performed with 45 nM purified Cas13, 22.5 nM crRNA, quenched fluorescent RNA reporter (125 nM RNAse Alert v2, Thermo Scientific, homopolymer and di-nucleotide reporters (IDT), 250 nM for polyA Trilink reporter), 0.5 μL murine RNase inhibitor (New England Biolabs), 25 ng of background total human RNA (purified from HEK293FT culture), and 1 uL of RPA reaction in nuclease assay buffer (20 mM HEPES, 60 mM NaCl, 6 mM MgCl2, pH 6.8), rNTP mix (1 mM final, NEB), 0.6 μL T7 polymerase (Lucigen) and 3 mM MgCl2. Reactions were allowed to proceed for 1-3 hr at 37° C. (unless otherwise indicated) on a fluorescent plate reader (BioTek) with fluorescent kinetics measured every 5 min.

[0729] For one-pot nucleic acid detection, the detection assay was carried out as described before (Gootenberg et al. Science 356:438-442 (2017)) with minor modifications. A single 100 μL combined reaction assay consisted of 0.48 μM forward primer, 0.48 μM reverse primer, 1× RPA rehydration buffer, varying amounts of DNA input, 45 nM LwCas13a recombinant protein, 22.5 nM crRNA, 125 ng background total human RNA, 125 nM substrate reporter (RNase alert v2), 2.5 μL murine RNase inhibitor (New England Biolabs), 2 mM ATP, 2 mM GTP, 2 mM UTP, 2 mM CTP, 1 μL T7 polymerase mix (Lucigen), 5 mM MgCl2, and 14 mM MgAc. Reactions were allowed to proceed for 1-3 hr at 37° C. (unless otherwise indicated) on a fluorescent plate reader (BioTek) with fluorescent kinetics measured every 5 min. For lateral flow readout, 20 uL of the combined reaction was added to 100 uL of HybriDetect 1 assay buffer (Milenia) and run on HybriDetect 1 lateral flow strips (Milenia).

[0730] Nucleic acid labeling for cleavage fragment analysis. Target RNA was in vitro transcribed from a dsDNA template and purified as described above. The in vitro cleavage reaction was performed as described above for fluorescence cleavage reaction with the following modifications. Fluorescence reporter was substituted for 1 μg RNA target and no background RNA was used. Cleavage reaction was carried out for 5 minutes (LwaCas13a) or 1 hour (PsmCas13b) at 37° C. The cleavage reaction was purified using the RNA clean & concentrator-5 kit (Zymo Research) and eluted in 10 uL UltraPure water (Gibco). Cleavage reaction was further labeled with a 10 μg of maleimide IRDye 800CW (Licor) following the 5′EndTag labeling Reaction (Vector Laboratories) kit protocol. To determine the 5′ end produced by Cas13 cleavage, the protocol was modified to either perform an Alkaline Phosphatase (AP) treatment or substitute with UltraPure water to only label 5′-OH containing RNA species, while undigested triphosphorylated (PPP) RNA species are only labeled when AP treatment is performed.

[0731] Mass spectrometry for high resolution cleavage fragment analysis. For determining the cleavage ends produced by Cas13 collateral RNase activity by Mass Spectrometry, an in vitro cleavage reaction was performed as described above with the following modifications. Cas13 RNA target was used at 1 nM final concentration, Csm6 activator at 3 μM final concentration and no background RNA was used. For control reactions, either Cas13 target was substituted by UltraPure water, or standard in vitro cleavage reaction was incubated with hexaadenylate containing a 2′, 3′ cyclic phosphate activator in the absence of Cas13 target, Cas13 protein and Cas13 crRNA. The cleavage reactions were carried out for 1h at 37° C. and purified using an New England Biolabs siRNA purification protocol. In brief, one-tenth volume of 3 M NaOAc, 2 μL of RNasefree Glycoblue (Thermofisher) and three volumes of cold 95% ethanol was added, placed at −20° C. for 2 hours, and centrifuged for 15 minutes at 14,000 g. The supernatant was removed and two volumes of 80% EtOH was added and incubated for 10 minutes at room temperature. The supernatant was decanted and samples centrifuged for 5 minutes at 14,000 g. After air-drying the pellet, 50 μL of UltraGrade water added and sent on dry ice for Mass spectrometry analysis.

[0732] For mass spectrometry analysis, samples were diluted 1:1 with UltraGrade water and analyzed on Bruker Impact II q-TOF mass spectrometer in negative ion mode coupled to an Agilent 1290 HPLC. 10 μL were injected onto a PLRP-S column (50 mm, 5 um particle size, 1000 angstrom pore size PLRP-S column, 2.1 mm ID) using 0.1% ammonium hydroxide v/v in water as mobile phase A and acetonitrile as mobile phase B. The flow rate was kept constant throughout at 0.3 ml/minute. The mobile phase composition started at 0% B and was maintained for the first 2 minutes. After this point, the composition was changed to 100% B over the next 8 minutes and maintained for one minute. The composition was then returned to 0% B over 0.1 minute and then maintained for the following 4.9 minutes to allow the column to re-equilibrate to starting conditions. The mass spectrometer was tuned for large MW ions, and data was acquired between m/z 400-5000. The entire dataset from the mass spectrometer was calibrated by m/z using an injection of sodium formate. Data was analyzed using Bruker Compass Data Analysis 4.3 with a license for MaxEnt deconvolution algorithm to generate a calculated neutral mass spectrum from the negatively charged ion data.

[0733] Genomic DNA extraction from human saliva. Saliva DNA extraction was carried out as described before (Gootenberg et al. Science 356:438-442 (2017)) with minor modifications and is detailed below. 2 mL of saliva was collected from volunteers, who were restricted from consuming food or drink 30 min prior to collection. Samples were then processed using QIAamp® DNA Blood Mini Kit (Qiagen) as recommended by the kit protocol. For boiled saliva samples, 400 μL of phosphate buffered saline (Sigma) was added to 100 μL of volunteer saliva and centrifuged for 5 min at 1800 g. The supernatant was decanted and the pellet was resuspended in phosphate buffered saline with 0.2% Triton X-100 (Sigma) before incubation at 95° C. for 5 min. 1 μL of sample was used as direct input into RPA reactions.

[0734] Digital droplet PCR quantification. ddPCR quantification was carried out as described before (Gootenberg et al. Science 356:438-442 (2017)) with minor modifications and is detailed below. To confirm the concentration of target dilutions, we performed digitaldroplet PCR (ddPCR). For DNA quantification, droplets were made using the ddPCR Supermix for Probes (no dUTP) (BioRad) with PrimeTime qPCR probes/primer assays (IDT) designed for the target sequence. For RNA quantification, droplets were made using the one-step RT-ddPCR kit for probes with PrimeTime qPCR probes/primer assays designed for the target sequence. Droplets were generated in either case using the QX200 droplet generator (BioRad) and transferred to a PCR plate. Droplet-based amplification was performed on a thermocycler as described in the kit protocol and nucleic acid concentrations were subsequently determined via measurement on a QX200 droplet reader.

[0735] Cas13-Csm6 fluorescent cleavage assay. Cas13-Csm6 combined fluorescent cleavage assays were performed as described for standard Cas13 fluorescent cleavage reactions with the following modifications. Csm6 protein was added to 10 nM final concentration, 400 nM of Csm6 fluorescent reporter and 500 nM Csm6 activator unless otherwise indicated. For distinguishing Cas13 from Csm6 collateral RNase activity, two distinct fluorophores were used for fluorescence detection (FAM and HEX). Because of the interference of rNTPs with Csm6 activity, the IVT was performed in the RPA pre-amplification step and then 1 μL of this reaction was added as input to the Cas13-Csm6 cleavage assay.

[0736] In the case where we tested a three-step Cas13-Csm6 cleavage assay, the RPA was performed normally as discussed above for varying times and then used as input to a normal IVT reaction for varying times. Then 1 μL of the IVT was used as input to the Cas13-Csm6 reaction described in the previous paragraph.

[0737] Motif discovery screen with library. To screen for Cas13 cleavage preference, an in vitro RNA cleavage reaction was set up as described above with the following modifications. Cas13 target was used at 20 nM, fluorescent reporter was substituted for 1 μM of DNA-RNA oligonucleotide (IDT) that contains a 6-mer stretch of randomized ribonucleotides flanked by DNA handles for NGS library preparation. Reactions were carried out for 60 minutes (unless otherwise indicated) at 37° C. The reactions were purified using the Zymo oligo-clean and concentrator-5 kit (Zymo research) and 15 μL of UltraPure water was used for elution. 10 μL of purified reaction was used for reverse transcription using a gene-specific primer that binds to the DNA handle.

[0738] Reverse transcription (RT) was carried out for 45 minutes at 42° C. according to the qScript Flex cDNA-kit (quantabio) protocol. To assess cleavage efficiency and product purity, RTreactions were diluted 1:10 in water and loaded on a Small RNA kit and run on a Bioanalyzer 2100 (Agilent). Four microliters of RT-reaction were used for the first-round of NGS library preparation. NEBNext (NEB) was used to amplify first strand cDNA with a mix of forward primers at 625 nM final and a reverse primer at 625 nM for 15 cycles with 3 minute initial denaturation at 98° C., 10s cycle denaturation at 98° C., 10s annealing at 63° C., 20s 72° C. extension and 2 minute final extension at 72° C.

[0739] Two microliters of first round PCR reaction was used for second round PCR amplification to attach Illumina-compatible indices (NEB) for NGS sequencing. The same NEBNext PCR protocol was used for amplification. PCR product were analysed by agarose gelelectrophoresis (2% Sybr Gold E-Gel Invitrogen system) and 5 μL of each reaction was pooled. The pooled samples were gel extracted, quantified with Qubit DNA 2.0 DNA High sensitivity kit and normalized to 4 nM final concentration. The final library was diluted to 2 pM and sequenced on a NextSeq 500 Illumina system using a 75-cycle kit.

[0740] Motif screen analysis. To analyze depletion of preferred motifs from the random motif library screen, 6-mer regions were extracted from sequence data and normalized to overall read count for each sample. Normalized read counts were then used to generated log ratios, with pseudo count adjustment, between experimental conditions and matched controls. For Cas13 experiments, matched controls did not have target RNA added; for Csm6 and RNase A experiments, matched controls did not have enzyme. Log ratio distribution shape was used to determine cut-offs for enriched motifs. Enriched motifs were then used to determine occurrence of 1-, 2-, or 3-nucleotide combinations. Motif logos were generated using Weblogo3 (Crooks et al. Genome Res 14:1188-1190 (2004)).

[0741] Phylogenetic analysis of Cas13 protein and cr RNA direct repeats. To study ortholog clustering, multiple sequence alignments were generated with Cas13a and Cas13b protein sequences in Geneious with MUSCLE and then clustered using Euclidean distance in R with the heatmap.2 function. To study direct repeat clustering, multiple sequence alignments were generated with Cas13a and Cas13b direct repeat sequences in Geneious using the Geneious algorithm and then clustered using Euclidean distance in R with the heatmap.2 function. To study clustering of orthologs based on dinucleotide motif preference, the cleavage activity matrix was clustered using Euclidean distance in R using the heatmap.2 function.

[0742] Gold nanoparticle colorimetric. An RNA oligo was synthesized from IDT with thiols at the 5′ and 3′ ends (Table 25 for sequence). In order to deprotect the thiol groups, the oligo at a final concentration of 20 mM was reduced in 150 mM sodium phosphate buffer containing 100 mM DTT for 2 hours at room temperature. The oligo were then purified using sephadex NAP-5 columns (GE Healthcare) into a final volume of 700 μL water. As previously described (Zhao et al. Anal Chem 80:8431-8437 (2008)), the reduced oligo at 10 μM was added at a volume of 280 μL to 600 μL of 2.32 nM 15 nm-gold nanoparticles (Ted Pella), which is a 2000:1 ratio of oligo to nanoparticles. Subsequently, 10 μL of 1M Tris-HCl at pH8.3 and 90 μL of 1M NaCl were added to the oligo-nanoparticle mixture and incubated for 18 hours at room temperature with rotation. After 18 hours, additional 1M Tris-HCl (5 μL at pH8.3) was added with 5M NaCl (50 μL) and this was incubated for an additional 15 hours at room temperature with rotation. Following incubation, the final solution was centrifuged for 25 min at 22,000 g. The supernatant was discarded and the conjugated nanoparticles were resuspended in 50 μL of 200 mM NaCl.

[0743] The nanoparticles were tested for RNase sensitivity using an RNase A assay. Varying amounts of RNase A (Thermo Fischer) were added to 1× RNase A buffer and 6 μL of conjugated nanoparticles in a total reaction volume of 20 μL. Absorbance at 520 nm was monitored every 5 minutes for 3 hours using a plate spectrophotometer.

[0744] Cloning of REPAIR constructs, Mammalian cell transfection, RNA isolation and NGS library preparation for REPAIR. Constructs for simulating reversion of APC mutations and guide constructs for REPAIR were cloned as previously described (Cox et al. Science 358:1019-1027 (2017)). Briefly, 96 nt sequences centered on the APC:c.1262G>A mutation were designed and golden gate cloned under an expression vector, and corresponding guide sequences were golden gate cloned into U6 expression vectors for PspCas13b guides. To simulate patient samples, 300 ng of either mutant or wildtype APC expression vector was transfected into HEK293FT cells with Lipofectamine 2000 (Invitrogen), and two days post-transfection DNA was harvested with Qiamp DNA Blood Midi Kit (Qiagen) following manufacturer's instructions. 20 ng of DNA were used as input into SHERLOCK-LwaCas13a reactions.

[0745] RNA correction using the REPAIR system was performed as previously described (Cox et al. Science 358:1019-1027 (2017)): 150 ng of dPspCas13b-ADAR(DD)E488Q, 200 ng of guide vector, and 30 ng of APC expression vector were co-transfected, and two-days post transfection RNA was harvested using the RNeasy Plus Mini Kit (Qiagen) following manufacturer's instructions. 30 ng of RNA was used as input into SHERLOCK-LwaCas13a reactions. All plasmids used for REPAIR RNA editing in this study are available in Table 26.

[0746] RNA editing fractions were independently determined by NGS as previously described. RNA was reverse transcribed with the qScript Flex kit (Quanta Biosciences) with a sequence specific primer. First strand cDNA was amplified with NEBNext High Fidelity 2× PCR Mastermix (New England Biosciences) with a mix of forward primers at 625 nM final and a reverse primer at 625 nM for 15 cycles with 3 minute initial denaturation at 98° C., 10 second cycle denaturation at 98° C., 30 second annealing at 65° C., 30 second 72° C. extension and 2 minute final extension at 72° C. Two microliters of first round PCR reaction was used for second round PCR amplification to attach Illumina-compatible indices for NGS sequencing, with NEBNext, using the same protocol with 18 cycles. PCR products were analysed by agarose gel-electrophoresis (2% Sybr Gold E-Gel Invitrogen) and 5 μL of each reaction was pooled. The pooled samples were gel extracted, quantified with Qubit DNA 2.0 DNA High sensitivity kit and normalized to 4 nM final concentration, and read out with a 300 cycle v2 MiSeq kit (Illumina).

[0747] Analysis of SHERLOCK fluorescence data. SHERLOCK fluorescence analysis was carried out as described before (Gootenberg et al. Science 356:438-442 (2017)) with minor modifications and is detailed below. To calculate background subtracted fluorescence data, the initial fluorescence of samples was subtracted to allow for comparisons between different conditions. Fluorescence for background conditions (either no input or no crRNA conditions) were subtracted from samples to generate background subtracted fluorescence.

[0748] crRNA ratios for SNP discrimination were calculated to adjust for sample-to-sample overall variation as follows:

$$crRNA {A}_{i} r atio = \frac{( m + n ) {A}_{i}}{{\sum }_{i = 1}^{m} {A}_{i} + {Σ}_{i = 1}^{n} {B}_{i}}$$

where Aᵢ and Bᵢ refer to the SHERLOCK intensity values for technical replicate i of the crRNAs sensing allele A or allele B, respectively, for a given individual. Since we typically have four technical replicates per crRNA, m and n are equal to 4 and the denominator is equivalent to the sum of all eight of the crRNA SHERLOCK intensity values for a given SNP locus and individual. Because there are two crRNAs, the crRNA ratio average across each of the crRNAs for an individual will always sum to two. Therefore, in the ideal case of homozygosity, the mean crRNA ratio for the positive allele crRNA will be two and the mean crRNA ratio for the negative allele crRNA will be zero. In the ideal case of heterozygosity, the mean crRNA ratio for each of the two crRNAs will be one. Because in SHERLOCKv2, we accomplish genotyping by measuring Aᵢ and Bᵢ in different color channels, we scaled the 530-color channel by 6 to match the intensity values in the 480-color channel.

[0749] Promiscuous cleavage of Cas13 orthologs in absence of target. Some members of the Cas13 family, such as PinCas13b and LbuCas13a, demonstrate promiscuous cleavage in the presence or absence of target, and this background activity is di-nucleotide reporter dependent (FIG. 123B). This background activity was also spacer dependent for LbuCas13a (FIG. 123C-D). In some reporters, the U and A base preference clustered within protein or DR similarity. Interestingly, di-nucleotide preferences identified here did not correspond with Cas13 families clustered from either direct repeat similarity or protein similarity (FIG. 124A-D).

[0750] Characterization of crRNA designs for PsmCas13b and CcaCas13b. To identify the optimal crRNA for detection with PsmCas13b and CcaCas13b, we tested crRNA spacer lengths from 34-12 nt and found that PsmCas13b had a peak sensitivity at a spacer length of 30, whereas CcaCas13b had equivalent sensitivity above spacer lengths of 28nt, justifying the use of 30nt spacers for evaluating Cas13 activity (FIG. 127). To further explore the robustness of targeting of CcaCas13b and PsmCas13b compared to LwaCas13a, we designed eleven different crRNAs evenly spaced across ssRNA 1 and found that LwaCas13a collateral activity was robust to crRNA design, while CcaCas13b and PsmCas13b both showed more variability in activity across different crRNAs (FIG. 128).

[0751] Random library motif screening for additional orthogonal motifs. To further explore the diversity of cleavage preferences of Cas13a and Cas13b orthologs, we developed a library-based approach for characterizing preferred motifs for collateral endonuclease activity. We used a degenerate 6-mer RNA reporter flanked by constant DNA handles, which allowed for amplification and readout of uncleaved sequences (FIG. 129A). Incubating this library with Cas13 enzymes resulted in detectable cleavage patterns that depended on the addition of target RNA (FIG. 129), and sequencing of depleted motifs from these reactions revealed an increase in the skew of the library over digestion time (FIG. 129C), indicative of a population of preferred motifs for cleavage. Sequence logos and pairwise base preferences from highly depleted motifs (FIG. 129D) reproduced the Up reference observed for LwaCas13a and CcaCas13b and the A-preference of PsmCas13b (FIG. 129E and FIG. 130A). We synthesized reporters from top motifs as determined from the screen to validate the findings, and found that LwaCas13a, CcaCas13a, and PsmCas13b all cleaved their most highly preferred motifs (FIG. 130B, C). We also found multiple sequences that showed cleavage for only one ortholog, but not others, which could allow for an alternative orthogonal readout from di-nucleotide motifs (FIG. 131). LwaCas13a incubated with different targets produced similar cleavage motif preferences, indicating that the base preference of the collateral activity is constant regardless of target sequence (FIG. 132).

### Example 10—Multiplexed Lateral Flow

### Concept for Two-Plex Lateral Flow

[0752] This concept involves two probes: FAM-T*A*rArUG*C*-Biotin (LwaCas13a cuts) and FAM-T*A*rUrAG*C*-DIG (CcaCas13b10 cuts). These probes will bind the anti-DIG line and the streptavidin line on the dual plex lateral flow strip. One can then scan for fluorescence and detect decreases in the line intensity corresponding to collateral activity and thus target presence of target sequences. Other motifs or probes (poly A for PsmCas13b and DNA sensors for Cas12 sensing) could also be used.

[0753] Two-Plex Lateral Flow Assay for Dengue RNA and ssRNA1

[0754] In this assay, two probes were used:
[0755] FAM-T*A*rArUG*C*-Biotin (LwaCas13a cuts)—sensing ssRNA 1
[0756] FAM-T*A*rUrAG*C*-DIG (CcaCas13b10 cuts)—sensing Dengue RNA

[0757] Results are shown in FIGS. 103A and 103B.

[0758] Four-Plex Lateral Flow Assay

[0759] Applicants have designed and synthesized lateral flow strips that allow for 4 lines and simultaneous detection of 4 targets.

[0760] The probes used were as follows:
[0761] /5TYE665/T*A*rArUG*C*/3AlexF488N/—LwaCas13a
[0762] /5TYE665/T*A*rUrAG*C*/36-FAM/—CcaCas13b
[0763] /5TYE665/rArArArArA/3Bio/—PsmCas13b
[0764] /5TYE665/AAAAA/3Dig_N/—AsCas12a
   The strips contain anti-Alexa-fluor-488, anti-FAM, Streptavidin, and anti-Dig lines allowing for detection of up to 4 targets. The Tye665 dye will be sensed and decreases in line fluorescent intensity will indicate target presence.

[0765] Various modifications and variations of the described methods, pharmaceutical compositions, and kits of the invention will be apparent to those skilled in the art without departing from the scope and spirit of the invention. Although the invention has been described in connection with specific embodiments, it will be understood that it is capable of further modifications and that the invention as claimed should not be unduly limited to such specific embodiments. Indeed, various modifications of the described modes for carrying out the invention that are obvious to those skilled in the art are intended to be within the scope of the invention. This application is intended to cover any variations, uses, or adaptations of the invention following, in general, the principles of the invention and including such departures from the present disclosure come within known customary practice within the art to which the invention pertains and may be applied to the essential features herein before set forth.

1. A nucleic acid detection system comprising:
i) two or more CRISPR systems, each CRISPR system comprising a Cas protein and a guide molecule comprising a guide sequence capable of binding a corresponding target molecule, and designed to form a complex with the Cas protein; and
ii) a set of detection constructs, each detection construct comprising a cutting motif sequence that is preferentially cut by one of the Cas proteins,
wherein the Cas protein of each CRISPR system exhibits collateral nucleic acid cleavage activity and preferentially cleaves the cutting motif sequence of one or more of the set of detection constructs.

2. A system for detecting the presence of two or more target polypeptides in an in vitro sample comprising:
i) a set of detection constructs, each detection construct comprising a cutting motif sequence that is preferentially cut by a Cas protein;
ii) a set of detection aptamers, each designed to bind to one of the two or more target polypeptides, and each detection aptamer comprising a cutting motif sequence that is preferentially cut by a Cas protein of one of two or more CRISPR Systems; a masked RNA polymerase promoter binding site or a masked primer binding site; and a trigger sequence template, encoding a trigger sequence;
iii) two or more CRISPR systems, each CRISPR system comprising a Cas protein and a guide polynucleotide comprising a guide sequence capable of binding the trigger sequence encoded by the trigger sequence template;
wherein the Cas protein exhibits collateral nucleic acid cleavage activity and cleaves the non-target sequence of the nucleic acid-based masking construct once activated by the trigger sequence.

3. The system of claim 1, further comprising nucleic acid amplification reagents to amplify the target molecule; wherein the reagents to amplify target RNA molecules optionally comprise nucleic acid sequence-based amplification (NASBA), recombinase polymerase amplification (RPA), loop-mediated isothermal amplification (LAMP), strand displacement amplification (SDA), helicase-dependent amplification (HDA), nicking enzyme amplification reaction (NEAR), PCR, multiple displacement amplification (MDA), rolling circle amplification (RCA), ligase chain reaction (LCR), or ramification amplification method (RAM).

4. The system of claim 2, further comprising nucleic acid amplification reagents to amplify a target sequence; wherein the reagents optionally comprise nucleic acid sequence-based amplification (NASBA), recombinase polymerase amplification (RPA), loop-mediated isothermal amplification (LAMP), strand displacement amplification (SDA), helicase-dependent amplification (HDA), nicking enzyme amplification reaction (NEAR), PCR, multiple displacement amplification (MDA), rolling circle amplification (RCA), ligase chain reaction (LCR), or ramification amplification method (RAM).

5. The system of claim 1, wherein the two or more CRISPR systems are RNA-targeting Cas proteins, DNA-targeting Cas proteins, or a combination thereof; wherein the RNA-targeting Cas proteins optionally comprise one or more HEPN domains; wherein the one or more HEPN domains optionally comprises a RxxxxH motif sequence; wherein the RxxxH motif optionally comprises a R{N/H/K]X₁X₂X₃H sequence; wherein X₁ is optionally R, S, D, E, Q, N, G, or Y, and X₂ is optionally independently I, S, T, V, or L, and X₃ is optionally independently L, F, N, Y, V, I, S, D, E, or A; wherein the DNA-targeting Cas protein is optionally a Cas12 protein; and wherein the Cas12 protein is optionally Cpf1 or C2c1.

6. (canceled)

7. (canceled)

8. (canceled)

9. (canceled)

10. The system of claim 1, wherein the Cas protein is a CRISPR RNA-targeting Cas13 protein; wherein the Cas13 protein is optionally a Cas13a, Cas13b, or Cas13c protein; wherein the Cas13a protein is optionally from an organism of a genus selected from the group consisting of: Leptotrichia, Listeria, Corynebacter, Sutterella, Legionella, Treponema, Filifactor, Eubacterium, Streptococcus, Lactobacillus, Mycoplasma, Bacteroides, Flaviivola, Flavobacterium, Sphaerochaeta, Azospirillum, Gluconacetobacter, Neisseria, Roseburia, Parvibaculum, Staphylococcus, Nitratifractor, Mycoplasma, Campylobacter, and Lachnospira; or wherein the Cas13a protein is optionally selected from Table 1, Table 2, or a combination thereof; wherein the Cas13b protein is optionally from an organism of a genus selected from the group consisting of: Bergeyella, Prevotella, Porphyromonas, Bacterioides, Alistipes, Riemerella, Myroides, Capnocytophaga, Porphyromonas, Flavobacterium, Porphyromonas, Chryseobacterium, Paludibacter, Psychroflexus, Riemerella, Phaeodactylibacter, Sinomicrobium, Reichenbachiella; or wherein the Cas13b protein is optionally selected from Table 4, 5, or a combination thereof; or wherein the Cas13c protein is optionally from an organism of a genus selected from the group consisting of: Fusobacterium and Anaerosalibacter; or wherein the Cas13c protein is optionally selected from Table 6.

11. (canceled)

12. (canceled)

13. (canceled)

14. (canceled)

15. (canceled)

16. (canceled)

17. (canceled)

18. (canceled)

19. (canceled)

20. (canceled)

21. (canceled)

22. (canceled)

23. The system of claim 5, wherein the Cpf1 is selected from an organism of the genus consisting of; Streptococcus, Campylobacter, Nitratifractor, Staphylococcus, Parvibaculum, Roseburia, Neisseria, Gluconacetobacter, Azospirillum, Sphaerochaeta, Lactobacillus, Eubacterium, Corynebacter, Carnobacterium, Rhodobacter, Listeria, Paludibacter, Clostridium, Lachnospiraceae, Clostridiaridium, Leptotrichia, Francisella, Legionella, Alicyclobacillus, Methanomethyophilus, Porphyromonas, Prevotella, Bacteroidetes, Helcococcus, Letospira, Desulfovibrio, Desulfonatronum, Opitutaceae, Tuberibacillus, Bacillus, Brevibacilus, Methylobacterium or Acidaminococcus; e.g., a chimeric Cas protein comprising a first fragment and a second fragment wherein each of the first and second fragments is selected from a Cpf1 of an organism comprising Streptococcus, Campylobacter, Nitratifractor, Staphylococcus, Parvibaculum, Roseburia, Neisseria, Gluconacetobacter, Azospirillum, Sphaerochaeta, Lactobacillus, Eubacterium, Corynebacter, Carnobacterium, Rhodobacter, Listeria, Paludibacter, Clostridium, Lachnospiraceae, Clostridiaridium, Leptotrichia, Francisella, Legionella, Alicyclobacillus, Methanomethyophilus, Porphyromonas, Prevotella, Bacteroidetes, Helcococcus, Letospira, Desulfovibrio, Desulfonatronum, Opitutaceae, Tuberibacillus, Bacillus, Brevibacilus, Methylobacterium or Acidaminococcus; and wherein the Cpf1 is optionally selected from one or more of Acidaminococcus sp. BV3L6 Cpf1 (AsCpf1); Francisella tularensis subsp. Novicida U112 Cpf1 (FnCpf1); L. bacterium MC2017 Cpf1 (Lb3Cpf1); Butyrivibrio proteoclasticus Cpf1 (BpCpf1); Parcubacteria bacterium GWC2011_GWC2_44_17 Cpf1 (PbCpf1); Peregrinibacteria bacterium GW2011_GWA_33_10 Cpf1 (PeCpf1); Leptospira inadai Cpf1 (LiCpf1); Smithella sp. SC_K08D17 Cpf1 (SsCpf1); L. bacterium MA2020 Cpf1 (Lb2Cpf1); Porphyromonas crevioricanis Cpf1 (PcCpf1); Porphyromonas macacae Cpf1 (PmCpf1); Candidatus Methanoplasma termitum Cpf1 (CMtCpf1); Eubacterium eligens Cpf1 (EeCpf1); Moraxella bovoculi 237 Cpf1 (MbCpf1); Prevotella disiens Cpf1 (PdCpf1); or L. bacterium ND2006 Cpf1 (LbCpf1).

24. (canceled)

25. (canceled)

26. The system of claim 5, wherein the C2c1 is selected from an organism from the genus consisting of Alicyclobacillus, Desulfovibrio, Desulfonatronum, Opitutaceae, Tuberibacillus, Bacillus, Brevibacillus, Candidatus, Desulfatirhabdium, Elusimicrobia, Citrobacter, Methylobacterium, Omnitrophicai, Phycisphaerae, Planctomycetes, Spirochaetes, and Verrucomicrobiaceae; wherein the C2c1 is optionally selected from one or more of Alicyclobacillus acidoterrestris (e.g., ATCC 49025), Alicyclobacillus contaminans (e.g., DSM 17975), Alicyclobacillus macrosporangiidus (e.g. DSM 17980), Bacillus hisashii strain C4, Candidatus Lindowbacteria bacterium RIFCSPLOWO2, Desulfovibrio inopinatus (e.g., DSM 10711), Desulfonatronum thiodismutans (e.g., strain MLF-1), Elusimicrobia bacterium RIFOXYA12, Omnitrophica WOR_2 bacterium RIFCSPHIGHO2, Opitutaceae bacterium TAV5, Phycisphaerae bacterium ST-NAGAB-D1, Planctomycetes bacterium RBG_13_46_10, Spirochaetes bacterium GWB1_27_13, Verrucomicrobiaceae bacterium UBA2429, Tuberibacillus calidus (e.g., DSM 17572), Bacillus thermoamylovorans (e.g., strain B4166), Brevibacillus sp. CF112, Bacillus sp. NSP2.1, Desulfatirhabdium butyrativorans (e.g., DSM 18734), Alicyclobacillus herbarius (e.g., DSM 13609), Citrobacter freundii (e.g., ATCC 8090), Brevibacillus agri (e.g., BAB-2500), Methylobacterium nodulans (e.g., ORS 2060).

27. (canceled)

28. The system of claim 1, wherein the two or more CRISPR systems comprise two or more Cas13 proteins, two or more Cas12 proteins or a combination of Cas13 and Cas12 proteins.

29. The system of claim 2, wherein the masking construct suppresses generation of a detectable positive signal until cleaved by an activated CRISPR Cas protein; wherein the masking construct suppresses generation of a detectable positive signal by masking the detectable positive signal, or generating a detectable negative signal instead; wherein the masking construct optionally comprises a silencing RNA that suppresses generation of a gene product encoded by a reporting construct, wherein the gene product generates the detectable positive signal when expressed; wherein the masking construct is optionally a ribozyme that generates the negative detectable signal, wherein the positive detectable signal is generated when the ribozyme is deactivated; wherein the ribozyme optionally converts a substrate to a first color and wherein the substrate converts to a second color when the ribozyme is deactivated.

30. (canceled)

31. (canceled)

32. (canceled)

33. (canceled)

34. The system of claim 29, wherein the masking construct is a DNA or RNA aptamer and/or comprises a DNA or RNA-tethered inhibitor; wherein the aptamer or DNA- or RNA-tethered inhibitor optionally sequesters an enzyme, wherein the enzyme generates a detectable signal upon release from the aptamer or DNA or RNA tethered inhibitor by acting upon a substrate; wherein the aptamer is optionally an inhibitor aptamer that inhibits an enzyme and prevents the enzyme from catalyzing generation of a detectable signal from a substance or wherein the DNA- or RNA-tethered inhibitor inhibits an enzyme and prevents the enzyme from catalyzing generation of a detectable signal from a substrate; wherein the enzyme is optionally thrombin and the substrate is para-nitroanilide covalently linked to a peptide substrate for thrombin, or 7-amino-4 methylcoumarin covalently linked to a peptide substrate for thrombin; and wherein the aptamer optionally sequesters a pair of agents that when released from the aptamers combine to generate a detectable signal.

35. (canceled)

36. (canceled)

37. (canceled)

38. (canceled)

39. The system of claim 29, wherein the masking construct comprises a DNA or RNA oligonucleotide to which a detectable ligand and a masking component are attached; wherein the detectable ligand is optionally a fluorophore and the masking component is optionally a quencher molecule.

40. The system of claim 29, wherein the masking construct comprises a nanoparticle held in aggregate by bridge molecules, wherein at least a portion of the bridge molecules comprises DNA or RNA, and wherein the solution undergoes a color shift when the nanoparticle is disbursed in solution; wherein the nanoparticle is optionally a colloidal metal; and wherein the colloidal metal is optionally colloidal gold.

41. (canceled)

42. (canceled)

43. The system of claim 29, wherein the masking construct comprises a quantum dot linked to one or more quencher molecules by a linking molecule, wherein at least a portion of the linking molecule comprises DNA or RNA; wherein the masking construct optionally comprises DNA or RNA in complex with an intercalating agent, wherein the intercalating agent changes absorbance upon cleavage of the DNA or RNA; and wherein the intercalating agent is optionally pyronine-Y or methylene blue.

44. (canceled)

45. (canceled)

46. (canceled)

47. The system according to claim 1, wherein the one or more guide molecules designed to bind to corresponding target molecules comprise a mismatch; wherein the mismatch is optionally synthetic; and wherein said mismatch is optionally up- or downstream of a SNP or other single nucleotide variation in said target molecule; wherein said mismatch is optionally 1, 2, 3, 4, or 5 nucleotides upstream or downstream, more preferably 2 nucleotides; wherein said mismatch is at position 1, 2, 3, 4, 5, 6, 7, 8, or 9 of the spacer, preferably at position 2, position 3, position 4, position 5, or position 6; and wherein the mismatch is preferably downstream of said SNP or other single nucleotide variation in said guide molecule.

48. (canceled)

49. The system of claim 1, wherein the one or more guide molecules are designed to detect a single nucleotide polymorphism in a target RNA or DNA, or a splice variant of an RNA transcript.

50. The system of claim 1, wherein the one or more guide molecules are designed to bind to one or more target molecules that are diagnostic for a disease state; wherein the disease state is optionally cancer, an autoimmune disease, or an infection, optionally wherein the disease state is characterized by the presence or absence of an antibiotic or drug resistance or susceptibility gene or transcript or polypeptide, preferably in a pathogen or a cell; or wherein the one or more target molecules is optionally an antibiotic or drug resistance or susceptibility gene or transcript or polypeptide.

51. (canceled)

52. (canceled)

53. (canceled)

54. The system of claim 50, wherein the infection is caused by a virus, a bacterium, a fungus, a protozoan, or a parasite.

55. (canceled)

56. The system of claim 54, wherein the infection is caused by a virus; wherein the virus is optionally a DNA virus; wherein the DNA virus is optionally a member of the Myoviridae, Podoviridae, Siphoviridae, Alloherpesviridae, Herpesviridae (including human herpes virus, and Varicella Zoster virus), Malocoherpesviridae, Lipothrixviridae, Rudiviridae, Adenoviridae, Ampullaviridae, Ascoviridae, Asfarviridae (including African swine fever virus), Baculoviridae, Cicaudaviridae, Clavaviridae, Corticoviridae, Fuselloviridae, Globuloviridae, Guttaviridae, Hytrosaviridae, Iridoviridae, Maseilleviridae, Mimiviridae, Nudiviridae, Nimaviridae, Pandoraviridae, Papillomaviridae, Phycodnaviridae, Plasmaviridae, Polydnaviruses, Polyomaviridae (including Simian virus 40, JC virus, BK virus), Poxviridae (including Cowpox and smallpox), Sphaerolipoviridae, Tectiviridae, Turriviridae, Dinodnavirus, Salterprovirus, Rhizidovirus.

57. (canceled)

58. The system of claim 54, wherein the viral infection is caused by a double-stranded RNA virus, a positive sense RNA virus, a negative sense RNA virus, a retrovirus, or a combination thereof; wherein the viral infection is optionally caused by a Coronaviridae virus, a Picornaviridae virus, a Caliciviridae virus, a Flaviviridae virus, a Togaviridae virus, a Bornaviridae, a Filoviridae, a Paramyxoviridae, a Pneumoviridae, a Rhabdoviridae, an Arenaviridae, a Bunyaviridae, an Orthomyxoviridae, or a Deltavirus; wherein the viral infection is optionally caused by Coronavirus, SARS, Poliovirus, Rhinovirus, Hepatitis A, Norwalk virus, Yellow fever virus, West Nile virus, Hepatitis C virus, Dengue fever virus, Zika virus, Rubella virus, Ross River virus, Sindbis virus, Chikungunya virus, Borna disease virus, Ebola virus, Marburg virus, Measles virus, Mumps virus, Nipah virus, Hendra virus, Newcastle disease virus, Human respiratory syncytial virus, Rabies virus, Lassa virus, Hantavirus, Crimean-Congo hemorrhagic fever virus, Influenza, or Hepatitis D virus; wherein the infection is optionally caused by Dengue fever virus.

59. (canceled)

60. (canceled)

61. (canceled)

62. (canceled)

63. The system of claim 54, wherein the infection is caused by a bacterium; wherein the bacterium optionally comprises Acinetobacter species, Actinobacillus species, Actinomycetes species, an Actinomyces species, Aerococcus species an Aeromonas species, an Anaplasma species, an Alcaligenes species, a Bacillus species, a Bacteroides species, a Bartonella species, a Bifidobacterium species, a Bordetella species, a Borrelia species, a Brucella species, a Burkholderia species, a Campylobacter species, a Capnocytophaga species, a Chlamydia species, a Citrobacter species, a Coxiella species, a Corynbacterium species, a Clostridium species, an Eikenella species, an Enterobacter species, an Escherichia species, an Enterococcus species, an Ehlichia species, an Epidermophyton species, an Erysipelothrix species, a Eubacterium species, a Francisella species, a Fusobacterium species, a Gardnerella species, a Gemella species, a Haemophilus species, a Helicobacter species, a Kingella species, a Klebsiella species, a Lactobacillus species, a Lactococcus species, a Listeria species, a Leptospira species, a Legionella species, a Leptospira species, Leuconostoc species, a Mannheimia species, a Microsporum species, a Micrococcus species, a Moraxella species, a Morganell species, a Mobiluncus species, a Micrococcus species, Mycobacterium species, a Mycoplasm species, a Nocardia species, a Neisseria species, a Pasteurelaa species, a Pediococcus species, a Peptostreptococcus species, a Pityrosporum species, a Plesiomonas species, a Prevotella species, a Porphyromonas species, a Proteus species, a Providencia species, a Pseudomonas species, a Propionibacteriums species, a Rhodococcus species, a Rickettsia species, a Rhodococcus species, a Serratia species, a Stenotrophomonas species, a Salmonella species, a Serratia species, a Shigella species, a Staphylococcus species, a Streptococcus species, a Spirillum species, a Streptobacillus species, a Treponema species, a Tropheryma species, a Trichophyton species, an Ureaplasma species, a Veillonella species, a Vibrio species, a Yersinia species, a Xanthomonas species, or combination thereof.

64. (canceled)

65. The system of claim 54, wherein the infection is caused by a fungus; wherein the fungus is optionally Aspergillus, Blastomyces, Candidiasis, Coccidiodomycosis, Cryptococcus neoformans, Cryptococcus gatti, sp. Histoplasma sp. (such as Histoplasma capsulatum), Pneumocystis sp. (such as Pneumocystis jirovecii), Stachybotrys (such as Stachybotrys chartarum), Mucroymcosis, Sporothrix, fungal eye infections ringworm, Exserohilum, Cladosporium, Geotrichum, Saccharomyces, a Hansenula species, a Candida species, a Kluyveromyces species, a Debaryomyces species, a Pichia species, a Penicillium species, a Cladosporium species, a Byssochlamys species or a combination thereof.

66. (canceled)

67. The system of claim 54, wherein the infection is caused by a protozoan; wherein the protozoan is optionally Euglenozoa, a Heterolobosea, a Diplomonadida, an Amoebozoa, a Blastocystic, an Apicomplexa, or combination thereof.

68. (canceled)

69. The system of claim 54, wherein the infection is caused by a parasite; wherein the parasite is optionally Trypanosoma cruzi (Chagas disease), T brucei gambiense, T brucei rhodesiense, Leishmania braziliensis, L. infantum, L. mexicana, L. major, L. tropica, L. donovani, Naegleria fowleri, Giardia intestinalis (G. lamblia, G. duodenalis), canthamoeba castellanii, Balamuthia madrillaris, Entamoeba histolytica, Blastocystic hominis, Babesia microti, Cryptosporidium parvum, Cyclospora cayetanensis, Plasmodium falciparum, P. vivax, P. ovale, P. malariae, and Toxoplasma gondii, or combination thereof.

70. (canceled)

71. The system of claim 1, further comprising an enrichment CRISPR system, wherein the enrichment CRISPR system is designed to bind the corresponding target molecules prior to detection by the detection CRISPR system; wherein the enrichment CRISPR system optionally comprises a catalytically inactive CRISPR Cas protein; wherein the catalytically inactive CRISPR Cas protein is optionally a catalytically inactive C2c2; and wherein the enrichment CRISPR Cas protein optionally further comprises a tag, wherein the tag is used to pull down the enrichment CRISPR Cas system, or to bind the enrichment CRISPR system to a solid substrate; wherein the solid substrate is optionally a flow cell.

72. (canceled)

73. (canceled)

74. (canceled)

75. (canceled)

76. A diagnostic device comprising one or more individual discrete volumes, each individual discrete volume comprising the CRISPR system of claim 1.

77. The diagnostic device of claim 76, wherein each individual discrete volume further comprises one or more detection aptamers comprising a masked RNA polymerase promoter binding site or a masked primer binding site; and/or nucleic acid amplification reagents.

78. (canceled)

79. The device of claim 76, wherein the target molecule is a target DNA and the individual discrete volumes further comprise a primer that binds the target DNA and comprises an RNA polymerase promoter.

80. The device of claim 76, wherein the individual discrete volumes are droplets or microwells; wherein the individual discrete volumes are defined on a solid substrate; or wherein the individual discrete volumes are spots defined on a substrate; wherein the substrate is optionally a flexible materials substrate; and wherein the flexible materials substrate is optionally a paper substrate or a flexible polymer-based substrate.

81. (canceled)

82. (canceled)

83. (canceled)

84. (canceled)

85. (canceled)

86. A method for detecting target nucleic acids in samples, comprising:
distributing a sample or set of samples into one or more individual discrete volumes, the individual discrete volumes comprising the CRISPR system of claim 1;
incubating the sample or set of samples under conditions sufficient to allow binding of the one or more guide molecules to one or more target molecules;
activating the CRISPR Cas protein via binding of the one or more guide molecules to the one or more target molecules, wherein activating the CRISPR Cas protein results in modification of the RNA-based masking construct such that one or more detectable positive signals are generated; and
detecting the one or more detectable positive signals, wherein detection of the one or more detectable positive signals indicates a presence of one or more target molecules in the sample.

87. A method for detecting polypeptides in samples, comprising:
distributing a sample or set of samples into a set of individual discrete volumes, the individual discrete volumes comprising peptide detection aptamers and the CRISPR system of claim 1;
incubating the sample or set of samples under conditions sufficient to allow binding of the peptide detection aptamers to the one or more target molecules, wherein binding of the aptamer to a corresponding target molecule exposes the RNA polymerase binding site or primer binding site resulting in generation of a trigger RNA;
activating the RNA Cas protein via binding of the one or more guide molecules to the trigger RNA, wherein activating the RNA Cas protein results in modification of the RNA-based masking construct such that a detectable positive signal is produced; and
detecting the detectable positive signal, wherein detection of the detectable positive signal indicates a presence of one or more target molecules in a sample.

88. A method for detecting target nucleic acids in samples comprising:
contacting one or more samples with
i) two or more CRISPR systems, each CRISPR system comprising a Cas protein and a guide molecule comprising a guide sequence capable of binding a corresponding target molecule, and designed to form a complex with the Cas protein; and
ii) a set of detection constructs, each detection construct comprising a cutting motif sequence that is preferentially cut by one of the Cas proteins,
wherein the Cas protein of each CRISPR system exhibits collateral nucleic acid cleavage activity and preferentially cleaves the cutting motif sequence of one or more of the set of detection constructs; and
detecting a signal from cleavage of the cutting motif sequence of the detection construct, thereby detecting the one or more target nucleic acid sequences in the sample.

89. A method for detecting target nucleic acids in samples comprising:
contacting one or more samples with
i) a set of detection constructs, each detection construct comprising a cutting motif sequence that is preferentially cut by a Cas protein;
ii) a set of detection aptamers, each designed to bind to one of the two or more target polypeptides, and each detection aptamer comprising a cutting motif sequence that is preferentially cut by a Cas protein of one of the two or more CRISPR Systems; a masked RNA polymerase promoter binding site or a masked primer binding site; and a trigger sequence template, encoding a trigger sequence;
iii) two or more CRISPR systems, each CRISPR system comprising a Cas protein and a guide polynucleotide comprising a guide sequence capable of binding the trigger sequence encoded by the trigger sequence template;
wherein the Cas protein exhibits collateral nucleic acid cleavage activity and cleaves the non-target sequence of the nucleic acid-based masking construct once activated by the trigger sequence; and
detecting a signal from cleavage of the cutting motif sequence of the detection construct, thereby detecting the one or more target nucleic acid sequences in the sample.

90. The method of claim 89, wherein the target nucleic acid is a target DNA and the method further comprises binding the target DNA with a primer comprising an RNA polymerase site; and wherein the method further comprises amplifying the target nucleic acid or the trigger sequence; wherein amplifying comprises amplification by NASBA or RPA.

91. (canceled)

92. (canceled)

93. (canceled)

94. The method of claim 89, wherein the sample is a biological sample or an environmental sample; wherein the biological sample is optionally a blood, plasma, serum, urine, stool, sputum, mucous, lymph fluid, synovial fluid, bile, ascites, pleural effusion, seroma, saliva, cerebrospinal fluid, aqueous or vitreous humor, or any bodily secretion, a transudate, an exudate (for example, fluid obtained from an abscess or any other site of infection or inflammation), or fluid obtained from a joint (for example, a normal joint or a joint affected by disease, such as rheumatoid arthritis, osteoarthritis, gout or septic arthritis), or a swab of skin or mucosal membrane surface; wherein the environmental sample is optionally obtained from a food sample, paper surface, a fabric, a metal surface, a wood surface, a plastic surface, a soil sample, a fresh water sample, a waste water sample, a saline water sample, or a combination thereof.

95. (canceled)

96. (canceled)

97. The method of claim 88, wherein the one or more guide molecules are designed to detect a single nucleotide polymorphism in a target RNA or DNA, or a splice variant of an RNA transcript; wherein the one or more guide molecules are optionally designed to bind to cell-free nucleic acids.

98. The method of claim 88, wherein the one or more guide molecules are designed to bind to one or more target molecules that are diagnostic for a disease state; wherein the disease state is optionally an infection, an organ disease, a blood disease, an immune system disease, a cancer, a brain and nervous system disease, an endocrine disease, a pregnancy or childbirth-related disease, an inherited disease, or an environmentally-acquired disease; wherein the disease state is optionally characterized by the presence or absence of an antibiotic or drug resistance or susceptibility gene or transcript or polypeptide, preferably in a pathogen or a cell.

99. (canceled)

100. (canceled)

101. (canceled)

102. (canceled)

103. (canceled)

104. The method of claim 89, wherein the one or more guide polynucleotides comprise a mismatch, wherein the mismatch is optionally synthetic, wherein said mismatch is optionally up- or downstream of a SNP or other single nucleotide variation in said target molecule, optionally wherein said mismatch is 1, 2, 3, 4, or 5 nucleotides upstream or downstream, preferably 2 nucleotides, wherein said mismatch is optionally at position 1, 2, 3, 4, 5, 6, 7, 8, or 9 of the spacer, preferably position 2 or 5; and wherein the mismatch is preferably downstream of said SNP or other single nucleotide variation in said guide polynucleotide.

105. (canceled)

106. The system of claim 1, wherein said guide molecule comprises a spacer which is truncated relative to a wild type spacer; wherein the spacer optionally comprises less than 28 nucleotides, preferably between and including 20 to 27 nucleotides; wherein the spacer optionally consists of 20-25 nucleotides or 20-23 nucleotides, such as preferably 20 or 23 nucleotides.

107. (canceled)

108. (canceled)

109. The system of claim 2, wherein said masking construct comprises an RNA oligonucleotide designed to bind a G-quadruplex forming sequence, wherein a G-quadruplex structure is formed by the G-quadruplex forming sequence upon cleavage of the masking construct, and wherein the G-quadruplex structure generates a detectable positive signal.

110. The method of claim 86, further comprising comparing the detectable positive signal with a (synthetic) standard signal.

111. A method for detecting a target nucleic acid in a sample, comprising:
contacting a sample with the nucleic acid detection system according to claim 1; and
applying said contacted sample to a lateral flow immunochromatographic assay.

112. The method according to claim 111, wherein said nucleic acid detection system comprises an RNA-based masking construct comprising a first and a second molecule, and wherein said lateral flow immunochromatographic assay comprises detecting said first and second molecule, preferably at discrete detection sites on a lateral flow strip; wherein said first molecule and said second molecule is optionally detected by binding to an antibody recognizing said first or second molecule and detecting said bound molecule, preferably with sandwich antibodies; wherein said lateral flow strip optionally comprises an upstream first antibody directed against said first molecule, and a downstream second antibody directed against said second molecule, and wherein uncleaved RNA-based masking construct is bound by said first antibody if the target nucleic acid is not present in said sample, and wherein cleaved RNA-based masking construct is bound both by said first antibody and said second antibody if the target nucleic acid is present in said sample.

113. (canceled)

114. (canceled)

115. A lateral flow device comprising a substrate comprising a first end, wherein the first end comprises a sample loading portion and a first region loaded with a detectable ligand, two or more CRISPR Cas systems, two or more detection constructs, one or more first capture regions, each comprising a first binding agent, two or more second capture regions, each comprising a second binding agent, wherein each of the two or more CRISPR Cas systems comprises a CRISPR Cas protein and one or more guide sequences, each guide sequence configured to bind one or more target molecules.

116. The lateral flow device of claim 115, wherein each of the two or more detection constructs comprises an RNA or DNA oligonucleotide, comprising a first molecule on a first end and a second molecule on a second end; wherein the device optionally comprises two CRISPR Cas systems and two detection constructs or four CRISPR Cas systems and four detection constructs; wherein a first detection construct optionally comprises FAM as a first molecule and biotin as a second molecule or vice versa and a second detection construct comprises FAM as a first molecule and Digoxigenin (DIG) as a second molecule or vice versa; or wherein a first detection construct optionally comprises Tye665 as a first molecule and Alexa-fluor-488 as a second molecule or vice versa; wherein a second detection construct comprises Tye665 as a first molecule and FAM as a second molecule or vice versa; wherein a third detection construct comprises Tye665 as a first molecule and biotin as a second molecule or vice versa; and wherein a fourth detection construct comprises Tye665 as a first molecule and DIG as a second molecule or vice versa.

117. (canceled)

118. (canceled)

119. The lateral flow device of claim 115, wherein the sample loading portion further comprises one or more amplification reagents to amplify the one or more target molecules.

120. (canceled)

121. The lateral flow device of claim 115, wherein the CRISPR Cas protein is an RNA-targeting Cas protein or a DNA-targeting Cas protein; wherein the RNA-targeting Cas protein is optionally C2c2 or Cas13b; and wherein the DNA-targeting Cas protein is optionally Cas12a.

122. (canceled)

123. (canceled)

124. (canceled)

125. (canceled)

126. (canceled)

127. (canceled)

128. (canceled)

The application's sequence listing, which the Patent Office published only in electronic form, follows.

SEQUENCE LISTING (956 sequences)

SEQ ID NO: 1 - RNA, 64 nt, Leptotrichia wadei
  misc_feature (37)..(64): n is a, c, g, or u
gauuuagacuaccccaaaaagcaaggggacuaaaacnnnnnnnnnnnnnnnnnnnnnnnnnnnn

SEQ ID NO: 2 - RNA, 56 nt, Leptotrichia wadei
  misc_feature (29)..(56): n is a, c, g, or u
ccaccccaauaucgaaggggacuaaaacnnnnnnnnnnnnnnnnnnnnnnnnnnnn

SEQ ID NO: 3 - RNA, 70 nt, Artificial Sequence
  Synthetic Oligonucleotide
uacccggggauccucuagaaauauggauuacuugguagaacagcaaucuacucgaccugcaggcaugcaa

SEQ ID NO: 4 - DNA, 64 bp, Artificial Sequence
  Synthetic Oligonucleotide
gatttagactaccccaaaaagcaaggggactaaaacuagauugcuguucuaccaaguaauccau

SEQ ID NO: 5 - DNA, 10 bp, Artificial Sequence
  Synthetic Oligonucleotide
tagattgctg

SEQ ID NO: 6 - DNA, 10 bp, Artificial Sequence
  Synthetic Oligonucleotide
aagattgctg

SEQ ID NO: 7 - DNA, 10 bp, Artificial Sequence
  Synthetic Oligonucleotide
ttgattgctg

SEQ ID NO: 8 - DNA, 10 bp, Artificial Sequence
  Synthetic Oligonucleotide
tacattgctg

SEQ ID NO: 9 - DNA, 10 bp, Artificial Sequence
  Synthetic Oligonucleotide
tagtttgctg

SEQ ID NO: 10 - DNA, 10 bp, Artificial Sequence
  Synthetic Oligonucleotide
tagaatgctg

SEQ ID NO: 11 - DNA, 10 bp, Artificial Sequence
  Synthetic Oligonucleotide
tagatagctg

SEQ ID NO: 12 - DNA, 10 bp, Artificial Sequence
  Synthetic Oligonucleotide
tagattcctg

SEQ ID NO: 13 - DNA, 10 bp, Artificial Sequence
  Synthetic Oligonucleotide
tagattggtg

SEQ ID NO: 14 - DNA, 10 bp, Artificial Sequence
  Synthetic Oligonucleotide
tagattgcag

SEQ ID NO: 15 - DNA, 10 bp, Artificial Sequence
  Synthetic Oligonucleotide
tagattgctc

SEQ ID NO: 16 - DNA, 10 bp, Artificial Sequence
  Synthetic Oligonucleotide
atctaacgac

SEQ ID NO: 17 - DNA, 10 bp, Artificial Sequence
  Synthetic Oligonucleotide
atgtaacgac

SEQ ID NO: 18 - DNA, 10 bp, Artificial Sequence
  Synthetic Oligonucleotide
atgtatcgac

SEQ ID NO: 19 - RNA, 58 nt, Artificial Sequence
  Synthetic Oligonucleotide
gugcugcccagaagagaacagcagcuggcaucaugaagaaucccguuguggauggaau

SEQ ID NO: 20 - RNA, 64 nt, Artificial Sequence
  Synthetic Oligonucleotide
gauuuagacuaccccaaaaagcaaggggacuaaaacggauacuucaugaugccagcugcuguuc

SEQ ID NO: 21 - RNA, 58 nt, Artificial Sequence; identical to SEQ ID NO: 19
  Synthetic Oligonucleotide

SEQ ID NO: 22 - RNA, 64 nt, Artificial Sequence; identical to SEQ ID NO: 20
  Synthetic Oligonucleotide

SEQ ID NO: 23 - RNA, 58 nt, Artificial Sequence
  Synthetic Oligonucleotide
gugcugcccagaagagaacggcagcuggcaucaugaagaaccccguuguggauggaau

SEQ ID NO: 24 - DNA, 58 bp, Artificial Sequence
  Synthetic Oligonucleotide
gugcugcccagaagagaacagcagcuggcaucaugaagaatcccguuguggauggaau

SEQ ID NO: 25 - RNA, 28 nt, Artificial Sequence
  Synthetic Oligonucleotide
cuugucgucgaccguaguacuuguuagg

SEQ ID NO: 26 - RNA, 28 nt, Artificial Sequence
  Synthetic Oligonucleotide
ggauacuucaugaugccagcugcuguuc

SEQ ID NO: 27 - RNA, 58 nt, Artificial Sequence
  Synthetic Oligonucleotide
gugcugcccagaagagaacggcagcuggcaucaugaagaacccuguuguggauggaau

SEQ ID NO: 28 - RNA, 28 nt, Artificial Sequence
  Synthetic Oligonucleotide
cuugccgucgaccguaguacuucauggg

SEQ ID NO: 29 - RNA, 28 nt, Artificial Sequence
  Synthetic Oligonucleotide
ggguuguucaugaugccagcugccguuc

SEQ ID NO: 30 - RNA, 58 nt, Artificial Sequence
  Synthetic Oligonucleotide
aaaugcugcuggacaacaucaacacaccagaagggauuauaccagcucucuuugaacc

SEQ ID NO: 31 - RNA, 28 nt, Artificial Sequence
  Synthetic Oligonucleotide
uguaguuguguggucuucccuaaaaugg

SEQ ID NO: 32 - RNA, 28 nt, Artificial Sequence
  Synthetic Oligonucleotide
gguuuaaucccuucugguguguugaugu

SEQ ID NO: 33 - RNA, 58 nt, Artificial Sequence
  Synthetic Oligonucleotide
aaaugcuccuugacaacauaaacacaccagaagggauuaucccagcccucuuugagcc

SEQ ID NO: 34 - RNA, 28 nt, Artificial Sequence
  Synthetic Oligonucleotide
uguauuuguguggucuucccuaauuggg

SEQ ID NO: 35 - RNA, 28 nt, Artificial Sequence
  Synthetic Oligonucleotide
gggaaaaucccuucugguguguuuaugu

SEQ ID NO: 36 - RNA, 33 nt, Artificial Sequence
  Synthetic Oligonucleotide
caccgcagcaugucaagaucacagauuuugggc

SEQ ID NO: 37 - RNA, 28 nt, Artificial Sequence
  Synthetic Oligonucleotide
cccggccaaaaucugugaucuugacaug

SEQ ID NO: 38 - RNA, 28 nt, Artificial Sequence
  Synthetic Oligonucleotide
ccaggccaaaaucugugaucuugacaug

SEQ ID NO: 39 - RNA, 39 nt, Artificial Sequence
  Synthetic Oligonucleotide
caguaaaaauaggugauuuuggucuagcuacagagaaau

SEQ ID NO: 40 - RNA, 28 nt, Artificial Sequence
  Synthetic Oligonucleotide
ucuguguagcuagaccaaaaucaccuau

SEQ ID NO: 41 - RNA, 28 nt, Artificial Sequence
  Synthetic Oligonucleotide
ucaguguagcuagaccaaaaucaccuau

SEQ ID NO: 42 - protein, 18 aa, Leptotrichia shahii
IRKFIKIGTNERNRILHA

SEQ ID NO: 43 - protein, 18 aa, Lachnospiraceae bacterium
LYSLKSMLYSMRNSSFHF

SEQ ID NO: 44 - protein, 18 aa, Lachnospiraceae bacterium
LTDLKDVIYSMRNDSFHY

SEQ ID NO: 45 - protein, 18 aa, Clostridium aminophilum
ADDLRKAIYSLRNETFHF

SEQ ID NO: 46 - protein, 18 aa, Carnobacterium gallinarum
IWALRGSVQQIRNEIFHS

SEQ ID NO: 47 - protein, 18 aa, Carnobacterium gallinarum
LWAIRGAVQRVRNQIFHQ

SEQ ID NO: 48 - protein, 18 aa, Paludibacter propionicigenes
LWGIRGAVQQIRNNVNHY

SEQ ID NO: 49 - protein, 18 aa, Listeria weihenstephanensis
IWAIRGSIQQIRNEVYHC

SEQ ID NO: 50 - protein, 18 aa, Listeriaceae bacterium
IWAIRGSIQQIRNEVYHC

SEQ ID NO: 51 - protein, 18 aa, Leptotrichia wadei
FANIDEAISSIRHGIVHF

SEQ ID NO: 52 - protein, 18 aa, Rhodobacter capsulatus
VFALLRYLRGCRNQTFHL

SEQ ID NO: 53 - protein, 18 aa, Rhodobacter capsulatus
VFALLRYLRGCRNQTFHL

SEQ ID NO: 54 - protein, 18 aa, Rhodobacter capsulatus
VFALLRYLRGCRNQTFHL

SEQ ID NO: 55 - protein, 18 aa, Leptotrichia wadei
FANIDEAISSIRHGIVHF

SEQ ID NO: 56 - protein, 18 aa, Listeria seeligeri
SWGLRGAIAPIRNEIIHL

SEQ ID NO: 57 - protein, 15 aa, Leptotrichia shahii
SIRNYISHFYIVRNP

SEQ ID NO: 58 - protein, 15 aa, Lachnospiraceae bacterium
IFRNEIDHFHYFYDR

SEQ ID NO: 59 - protein, 15 aa, Lachnospiraceae bacterium
ELRNYIEHFRYYSSF

SEQ ID NO: 60 - protein, 15 aa, Clostridium aminophilum
DVRKYVDHFKYYATS

SEQ ID NO: 61 - protein, 15 aa, Carnobacterium gallinarum
KIRNQTAHLSVLQLE

SEQ ID NO: 62 - protein, 15 aa, Carnobacterium gallinarum
EIRNNIAHLHVLRND

SEQ ID NO: 63 - protein, 15 aa, Paludibacter proprionicigenes
DIRNHIAHFNYLTKD

SEQ ID NO: 64 - protein, 15 aa, Listeria weihenstephanensis
NARNHIAHLNYLSLK

SEQ ID NO: 65 - protein, 15 aa, Listeriaceae bacterium
NARNHIAHLNYLSLK

SEQ ID NO: 66 - protein, 15 aa, Leptotrichia wadei
YIRNYIAHFNYIPHA

SEQ ID NO: 67 - protein, 15 aa, Rhodobacter capsulatus
QTRKDLAHFNVLDRA

SEQ ID NO: 68 - protein, 15 aa, Rhodobacter capsulatus
QTRKDLAHFNVLDRA

SEQ ID NO: 69 - protein, 15 aa, Rhodobacter capsulatus
QTRKDLAHFNVLDRA

SEQ ID NO: 70 - protein, 15 aa, Leptotrichia wadei
YIRNYIAHFNYIPHA

SEQ ID NO: 71 - protein, 15 aa, Listeria seeligeri
EKRNNISHFNYLNGQ

SEQ ID NO: 72 - RNA, 27 nt, Leptotrichia wadei
gauuuagacuaccccaaaaagcaaggg

SEQ ID NO: 73 - RNA, 23 nt, Leptotrichia wadei
uagauugcuguucuaccaaguaa

SEQ ID NO: 74 - RNA, 20 nt, Leptotrichia wadei
uagauugcuguucuaccaag

SEQ ID NO: 75 - RNA, 28 nt, Leptotrichia wadei
auggauuacuugguagaacagcaaucua

SEQ ID NO: 76 - RNA, 28 nt, Leptotrichia wadei
auggauuacuugguagaacagcaaugua

SEQ ID NO: 77 - RNA, 17 nt, Leptotrichia wadei
uagauugcuguucuacc

SEQ ID NO: 78 - RNA, 17 nt, Leptotrichia wadei
aagauugcuguucuacc

SEQ ID NO: 79 - RNA, 16 nt, Leptotrichia wadei
uugauugcguucuacc

SEQ ID NO: 80 - RNA, 17 nt, Leptotrichia wadei
uaguuugcuguucuacc

SEQ ID NO: 81 - RNA, 17 nt, Leptotrichia wadei
uagaaugcuguucuacc

SEQ ID NO: 82 - RNA, 17 nt, Leptotrichia wadei
uagauagcuguucuacc

SEQ ID NO: 83 - RNA, 17 nt, Leptotrichia wadei
uagauuccuguucuacc

SEQ ID NO: 84 - RNA, 31 nt, Artificial Sequence
  Synthetic Oligonucleotide
auggauuacuugguagaacagcaaucuacuc

SEQ ID NO: 85 - RNA, 31 nt, Artificial Sequence
  Synthetic Oligonucleotide
auggauuacuugguagaacagcaauguacuc

SEQ ID NO: 86 - RNA, 28 nt, Artificial Sequence
  Synthetic Oligonucleotide
aagauugcuguucuaccaaguaauccau

SEQ ID NO: 87 - RNA, 28 nt, Artificial Sequence
  Synthetic Oligonucleotide
uugauugcuguucuaccaaguaauccau

SEQ ID NO: 88 - RNA, 28 nt, Artificial Sequence
  Synthetic Oligonucleotide
uaguuugcuguucuaccaaguaauccau

SEQ ID NO: 89 - RNA, 28 nt, Artificial Sequence
  Synthetic Oligonucleotide
uagaaugcuguucuaccaaguaauccau

SEQ ID NO: 90 - RNA, 28 nt, Artificial Sequence
  Synthetic Oligonucleotide
uagauagcuguucuaccaaguaauccau

SEQ ID NO: 91 - RNA, 28 nt, Artificial Sequence
  Synthetic Oligonucleotide
uagauuccuguucuaccaaguaauccau

SEQ ID NO: 92 - RNA, 31 nt, Artificial Sequence; identical to SEQ ID NO: 84
  Synthetic Oligonucleotide

SEQ ID NO: 93 - RNA, 31 nt, Artificial Sequence; identical to SEQ ID NO: 85
  Synthetic Oligonucleotide

SEQ ID NO: 94 - RNA, 28 nt, Artificial Sequence
  Synthetic Oligonucleotide
cuagauugcuguucuaccaaguaaucca

SEQ ID NO: 95 - RNA, 28 nt, Artificial Sequence
  Synthetic Oligonucleotide
gaagauugcuguucuaccaaguaaucca

SEQ ID NO: 96 - RNA, 28 nt, Artificial Sequence
  Synthetic Oligonucleotide
guugauugcuguucuaccaaguaaucca

SEQ ID NO: 97 - RNA, 28 nt, Artificial Sequence
  Synthetic Oligonucleotide
guaguuugcuguucuaccaaguaaucca

SEQ ID NO: 98 - RNA, 28 nt, Artificial Sequence
  Synthetic Oligonucleotide
guagaaugcuguucuaccaaguaaucca

SEQ ID NO: 99 - RNA, 28 nt, Artificial Sequence
  Synthetic Oligonucleotide
guagauagcuguucuaccaaguaaucca

SEQ ID NO: 100 - RNA, 31 nt, Artificial Sequence; identical to SEQ ID NO: 84
  Synthetic Oligonucleotide

SEQ ID NO: 101 - RNA, 30 nt, Artificial Sequence
  Synthetic Oligonucleotide
auggauuacuugguagaacagcaaguacuc

SEQ ID NO: 102 - RNA, 28 nt, Artificial Sequence
  Synthetic Oligonucleotide
acuagauugcuguucuaccaaguaaucc

SEQ ID NO: 103 - RNA, 28 nt, Artificial Sequence
  Synthetic Oligonucleotide
agaagauugcuguucuaccaaguaaucc

SEQ ID NO: 104 - RNA, 28 nt, Artificial Sequence
  Synthetic Oligonucleotide
aguugauugcuguucuaccaaguaaucc

SEQ ID NO: 105 - RNA, 28 nt, Artificial Sequence
  Synthetic Oligonucleotide
aguaguuugcuguucuaccaaguaaucc

SEQ ID NO: 106 - RNA, 28 nt, Artificial Sequence
  Synthetic Oligonucleotide
aguagaaugcuguucuaccaaguaaucc

SEQ ID NO: 107 - RNA, 28 nt, Artificial Sequence
  Synthetic Oligonucleotide
aguagauagcuguucuaccaaguaaucc

SEQ ID NO: 108 - RNA, 31 nt, Artificial Sequence; identical to SEQ ID NO: 84
  Synthetic Oligonucleotide

SEQ ID NO: 109 - RNA, 31 nt, Artificial Sequence; identical to SEQ ID NO: 85
  Synthetic Oligonucleotide

SEQ ID NO: 110 - RNA, 28 nt, Artificial Sequence
  Synthetic Oligonucleotide
gacuagauugcuguucuaccaaguaauc

SEQ ID NO: 111 - RNA, 28 nt, Artificial Sequence
  Synthetic Oligonucleotide
gagaagauugcuguucuaccaaguaauc

SEQ ID NO: 112 - RNA, 28 nt, Artificial Sequence
  Synthetic Oligonucleotide
gaguugauugcuguucuaccaaguaauc

SEQ ID NO: 113 - RNA, 28 nt, Artificial Sequence
  Synthetic Oligonucleotide
gaguaguuugcuguucuaccaaguaauc

SEQ ID NO: 114 - RNA, 28 nt, Artificial Sequence
  Synthetic Oligonucleotide
gaguagaaugcuguucuaccaaguaauc

SEQ ID NO: 115 - RNA, 28 nt, Artificial Sequence
  Synthetic Oligonucleotide
gaguagauagcuguucuaccaaguaauc

SEQ ID NO: 116 - DNA, 57 bp, Plasmodium falciparum
gaaattaatacgactcactatagggttattgcaattattaatcttgaacgaggaatg

SEQ ID NO: 117 - DNA, 57 bp, Plasmodium falciparum
gaaattaatacgactcactataggggattgacagattaatagctctttcttgatttc

SEQ ID NO: 118 - DNA, 32 bp, Plasmodium falciparum
atttttcttgtccaaacaattcatcatatctt

SEQ ID NO: 119 - DNA, 32 bp, Plasmodium falciparum
ttcaatttcaaataagaatatagtgtactcgc

SEQ ID NO: 120 - DNA, 57 bp, Plasmodium falciparum
gaaattaatacgactcactatagggttcttattagcagaacaaagaagtttaacaac

SEQ ID NO: 121 - DNA, 57 bp, Plasmodium falciparum
gaaattaatacgactcactatagggattttatgcaatgttaaaaactgttccaagta

SEQ ID NO: 122 - DNA, 32 bp, Plasmodium falciparum
taattgacatccaatccataataaagcataga

SEQ ID NO: 123 - DNA, 32 bp, Plasmodium falciparum
gaattatagttgttaaacttctttgttctgct

SEQ ID NO: 124 - DNA, 89 bp, Plasmodium falciparum
cctagtaagcatgattcatcagattgtggttttagtccccttcgtttttggggtagtctaaatcccctatagtgagtcgtattaatttc

SEQ ID NO: 125 - DNA, 89 bp, Plasmodium falciparum
ggatggtgatgcatggccgtttttagttgttttagtccccttcgtttttggggtagtctaaatcccctatagtgagtcgtattaatttc

SEQ ID NO: 126 - DNA, 89 bp, Plasmodium falciparum
caatttaaaatgatttttggtgctagaggttttagtccccttcgtttttggggtagtctaaatcccctatagtgagtcgtattaatttc

SEQ ID NO: 127 - DNA, 89 bp, Plasmodium falciparum
gctggtttagtaattgtattattatcatgttttagtccccttcgtttttggggtagtctaaatcccctatagtgagtcgtattaatttc

SEQ ID NO: 128 - DNA, 173 bp, Artificial Sequence
  Synthetic Oligonucleotide
ggccagtgaattcgagctcggtacccggggatcctctagaaatatggattacttggtagaacagcaatctactcgacctgcaggcatgcaagcttggcgtaatcatggtcatagctgtttcctgtgtttatccgctcacaattccacacaacatacgagccggaagcataaag

SEQ ID NO: 129 - DNA, 173 bp, Artificial Sequence
  Synthetic Oligonucleotide
ccggtcacttaagctcgagccatgggcccctaggagatctttatacctaatgaaccatcttgtcgttagatgagctggacgtccgtacgttcgaaccgcattagtaccagtatcgacaaaggacacaaataggcgagtgttaaggtgtgttgtatgctcggccttcgtatttc

SEQ ID NO: 130 - RNA, 20 nt, Artificial Sequence
  Synthetic Oligonucleotide
uggguuggguuggguuggga

SEQ ID NO: 131 - RNA, 23 nt, Artificial Sequence
  Synthetic Oligonucleotide
uggguuuggguuuggguuuggga

SEQ ID NO: 132 - DNA, 173 bp, Artificial Sequence; identical to SEQ ID NO: 128
  Synthetic Oligonucleotide

SEQ ID NO: 133 - RNA, 12 nt, Artificial Sequence
  Synthetic Oligonucleotide
  misc_feature (1)..(1): 5' 6-FAM tag
  misc_feature (12)..(12): 3' biotin tag
acacacacacac

SEQ ID NO: 134 - RNA, 29 nt, Prevotella
ccgcuucaccggcuaccccugcuccaaga

SEQ ID NO: 135 - DNA, 57 bp, Prevotella
ctggcggaggtggtggtagaaggtcuaggagcaggggtagccggtgaagcggacgta

SEQ ID NO: 136 - RNA, 28 nt, Leptotrichia wadei
cugcaccuucuaccaccaccuccgccag

SEQ ID NO: 137 - DNA, 58 bp, Leptotrichia wadei
cctggcggaggtggtggtagaaggtccaggagcaggggtagccggtgaagcggacgta

SEQ ID NO: 138 - RNA, 46 nt, Homo sapiens
acugugaaaccuguugggaguggcaggaagcucaugaaccaggcau

SEQ ID NO: 139 - RNA, 30 nt, Prevotella
ccugguucaugagcuuccugccacugccaa

SEQ ID NO: 140 - RNA, 44 nt, Homo sapiens
cagauacgcgcuuacugugaaaccuguuaggaguggcaggaagc

SEQ ID NO: 141 - RNA, 28 nt, Leptotrichia wadei
ccuaucagguuucacaguaagcgcguau

SEQ ID NO: 142 - RNA, 60 nt, Homo sapiens
ucuuuuggaacagauacgcgcuuacugugaaaccuguuaggaguggcaggaagcucauga

SEQ ID NO: 143 - RNA, 50 nt, Prevotella
agcuuccugccacucccaacagguuucacaguaagcgcguaucuguucca

SEQ ID NO: 144 - protein, 6 aa, Artificial Sequence
  Synthetic Peptide
  MISC_FEATURE (2)..(2): Xaa = N, H, or K
  MISC_FEATURE (3)..(3): Xaa = R, S, D, E, Q, N, G, Y, or H
  MISC_FEATURE (4)..(4): Xaa = I, S, T, V, or L
  MISC_FEATURE (5)..(5): Xaa = L, F, N, Y, V, I, S, D, E, or A
RXXXXH

SEQ ID NO: 145 - protein, 6 aa, Artificial Sequence
  Synthetic Peptide
  MISC_FEATURE (2)..(2): Xaa = N or H
  MISC_FEATURE (3)..(3): Xaa = R, S, D, E, Q, N, G, Y, or H
  MISC_FEATURE (4)..(4): Xaa = I, S, T, V, or L
  MISC_FEATURE (5)..(5): Xaa = L, F, N, Y, V, I, S, D, E, or A
RXXXXH

SEQ ID NO: 146 - protein, 6 aa, Artificial Sequence
  Synthetic Peptide
  MISC_FEATURE (2)..(2): Xaa = N or K
  MISC_FEATURE (3)..(3): Xaa = R, S, D, E, Q, N, G, Y, or H
  MISC_FEATURE (4)..(4): Xaa = I, S, T, V, or L
  MISC_FEATURE (5)..(5): Xaa = L, F, N, Y, V, I, S, D, E, or A
RXXXXH

SEQ ID NO: 147 - protein, 1434 aa, Leptotrichia shahii
MGNLFGHKRWYEVRDKKDFKIKRKVKVKRNYDGNKYILNINENNNKEKIDNNKFIRKYINYKKNDNILKEFTRKFHAGNILFKLKGKEGIIRIENNDDFLETEEVVLYIEAYGKSEKLKALGITKKKIIDEAIRQGITKDDKKIEIKRQENEEEIEIDIRDEYTNKTLNDCSIILRIIENDELETKKSIYEIFKNINMSLYKIIEKIIENETEKVFENRYYEEHLREKLLKDDKIDVILTNFMEIREKIKSNLEILGFVKFYLNVGGDKKKSKNKKMLVEKILNINVDLTVEDIADFVIKELEFWNITKRIEKVKKVNNEFLEKRRNRTYIKSYVLLDKHEKFKIERENKKDKIVKFFVENIKNNSIKEKIEKILAEFKIDELIKKLEKELKKGNCDTEIFGIFKKHYKVNFDSKKFSKKSDEEKELYKIIYRYLKGRIEKILVNEQKVRLKKMEKIEIEKILNESILSEKILKRVKQYTLEHIMYLGKLRHNDIDMTTVNTDDFSRLHAKEELDLELITFFASTNMELNKIFSRENINNDENIDFFGGDREKNYVLDKKILNSKIKIIRDLDFIDNKNNITNNFIRKFTKIGTNERNRILHAISKERDLQGTQDDYNKVINIIQNLKISDEEVSKALNLDVVFKDKKNIITKINDIKISEENNNDIKYLPSFSKVLPEILNLYRNNPKNEPFDTIETEKIVLNALIYVNKELYKKLILEDDLEENESKNIFLQELKKTLGNIDEIDENIIENYYKNAQISASKGNNKAIKKYQKKVIECYIGYLRKNYEELFDFSDFKMNIQEIKKQIKDINDNKTYERITVKTSDKTIVINDDFEYIISIFALLNSNAVINKIRNRFFATSVWLNTSEYQNIIDILDEIMQLNTLRNECITENWNLNLEEFIQKMKEIEKDFDDFKIQTKKEIFNNYYEDIKNNILTEFKDDINGCDVLEKKLEKIVIFDDETKFEIDKKSNILQDEQRKLSNINKKDLKKKVDQYIKDKDQEIKSKILCRIIFNSDFLKKYKKEIDNLIEDMESENENKFQEIYYPKERKNELYIYKKNLFLNIGNPNFDKIYGLISNDIKMADAKFLFNIDGKNIRKNKISEIDAILKNLNDKLNGYSKEYKEKYIKKLKENDDFFAKNIQNKNYKSFEKDYNRVSEYKKIRDLVEFNYLNKIESYLIDINWKLAIQMARFERDMHYIVNGLRELGIIKLSGYNTGISRAYPKRNGSDGFYTTTAYYKFFDEESYKKFEKICYGFGIDLSENSEINKPENESIRNYISHFYIVRNPFADYSIAEQIDRVSNLLSYSTRYNNSTYASVFEVFKKDVNLDYDELKKKFKLIGNNDILERLMKPKKVSVLELESYNSDYIKNLIIELLTKIENTNDTLKRPAATKKAGQAKKKKGSYPYDVPDYAYPYDVPDYAYPYDVPDYA

SEQ ID NO: 148 - protein, 1197 aa, Leptotrichia wadei
MKVTKVDGISHKKYIEEGKLVKSTSEENRTSERLSELLSIRLDIYIKNPDNASEEENRIRRENLKKFFSNKVLHLKDSVLYLKNRKEKNAVQDKNYSEEDISEYDLKNKNSFSVLKKILLNEDVNSEELEIFRKDVEAKLNKINSLKYSFEENKANYQKINENNVEKVGGKSKRNIIYDYYRESAKRNDYINNVQEAFDKLYKKEDIEKLFFLIENSKKHEKYKIREYYHKIIGRKNDKENFAKIIYEEIQNVNNIKELIEKIPDMSELKKSQVFYKYYLDKEELNDKNIKYAFCHFVEIEMSQLLKNYVYKRLSNISNDKIKRIFEYQNLKKLIENKLLNKLDTYVRNCGKYNYYLQVGEIATSDFIARNRQNEAFLRNIIGVSSVAYFSLRNILETENENDITGRMRGKTVKNNKGEEKYVSGEVDKIYNENKQNEVKENLKMFYSYDFNMDNKNEIEDFFANIDEAISSIRHGIVHFNLELEGKDIFAFKNIAPSEISKKMFQNEINEKKLKLKIFKQLNSANVFNYYEKDVIIKYLKNTKFNFVNKNIPFVPSFTKLYNKIEDLRNTLKFFWSVPKDKEEKDAQIYLLKNIYYGEFLNKFVKNSKVFFKITNEVIKINKQRNQKTGHYKYQKFENIEKTVPVEYLAIIQSREMINNQDKEEKNTYIDFIQQIFLKGFIDYLNKNNLKYIESNNNNDNNDIFSKIKIKKDNKEKYDKILKNYEKHNRNKEIPHEINEFVREIKLGKILKYTENLNMFYLILKLLNHKELTNLKGSLEKYQSANKEETFSDELELINLLNLDNNRVTEDFELEANEIGKFLDFNENKIKDRKELKKFDTNKIYFDGENIIKHRAFYNIKKYGMLNLLEKIADKAKYKISLKELKEYSNKKNEIEKNYTMQQNLHRKYARPKKDEKFNDEDYKEYEKAIGNIQKYTHLKNKVEFNELNLLQGLLLKILHRLVGYTSIWERDLRFRLKGEFPENHYIEEIFNFDNSKNVKYKSGQIVEKYINFYKELYKDNVEKRSIYSDKKVKKLKQEKKDLYIRNYIAHFNYIPHAEISLLEVLENLRKLLSYDRKLKNAIMKSIVDILKEYGFVATFKIGADKKIEIQTLESEKIVHLKNLKKKKLMTDRNSEELCELVKVMFEYKALEKRPAATKKAGQAKKKKGSYPYDVPDYAYPYDVPDYAYPYDVPDYA

SEQ ID NO: 149 - protein, 1120 aa, Listeria seeligeri
MWISIKTLIHHLGVLFFCDYMYNRREKKIIEVKTMRITKVEVDRKKVLISRDKNGGKLVYENEMQDNTEQIMHHKKSSFYKSVVNKTICRPEQKQMKKLVHGLLQENSQEKIKVSDVTKLNISNFLNHRFKKSLYYFPENSPDKSEEYRIEINLSQLLEDSLKKQQGTFICWESFSKDMELYINWAENYISSKTKLIKKSIRNNRIQSTESRSGQLMDRYMKDILNKNKPFDIQSVSEKYQLEKLTSALKATFKEAKKNDKEINYKLKSTLQNHERQIIEELKENSELNQFNIEIRKHLETYFPIKKTNRKVGDIRNLEIGEIQKIVNHRLKNKIVQRILQEGKLASYEIESTVNSNSLQKIKIEEAFALKFINACLFASNNLRNMVYPVCKKDILMIGEFKNSFKEIKHKKFIRQWSQFFSQEITVDDIELASWGLRGAIAPIRNEIIHLKKHSWKKFFNNPTFKVKKSKIINGKTKDVTSEFLYKETLFKDYFYSELDSVPELIINKMESSKILDYYSSDQLNQVFTIPNFELSLLTSAVPFAPSFKRVYLKGFDYQNQDEAQPDYNLKLNIYNEKAFNSEAFQAQYSLFKMVYYQVFLPQFTTNNDLFKSSVDFILTLNKERKGYAKAFQDIRKMNKDEKPSEYMSYIQSQLMLYQKKQEEKEKINHFEKFINQVFIKGFNSFIEKNRLTYICHPTKNTVPENDNIEIPFHTDMDDSNIAFWLMCKLLDAKQLSELRNEMIKFSCSLQSTEEISTFTKAREVIGLALLNGEKGCNDWKELFDDKEAWKKNMSLYVSEELLQSLPYTQEDGQTPVINRSIDLVKKYGTETILEKLFSSSDDYKVSAKDIAKLHEYDVTEKIAQQESLHKQWIEKPGLARDSAWTKKYQNVINDISNYQWAKTKVELTQVRHLHQLTIDLLSRLAGYMSIADRDFQFSSNYILERENSEYRVTSWILLSENKNKNKYNDYELYNLKNASIKVSSKNDPQLKVDLKQLRLTLEYLELFDNRLKEKRNNISHFNYLNGQLGNSILELFDDARDVLSYDRKLKNAVSKSLKEILSSHGMEVTFKPLYQTNHHLKIDKLQPKKIHHLGEKSTVSSNQVSNEYCQLVRTLLTMK

SEQ ID NO: 150 - protein, 1340 aa, Lachnospiraceae bacterium
MQISKVNHKHVAVGQKDRERITGFIYNDPVGDEKSLEDVVAKRANDTKVLFNVFNTKDLYDSQESDKSEKDKEIISKGAKFVAKSFNSAITILKKQNKIYSTLTSQQVIKELKDKFGGARIYDDDIEEALTETLKKSFRKENVRNSIKVLIENAAGIRSSLSKDEEELIQEYFVKQLVEEYTKTKLQKNVVKSIKNQNMVIQPDSDSQVLSLSESRREKQSSAVSSDTLVNCKEKDVLKAFLTDYAVLDEDERNSLLWKLRNLVNLYFYGSESIRDYSYTKEKSVWKEHDEQKANKTLFIDEICHITKIGKNGKEQKVLDYEENRSRCRKQNINYYRSALNYAKNNTSGIFENEDSNHFWIHLIENEVERLYNGIENGEEFKFETGYISEKVWKAVINHLSIKYIALGKAVYNYAMKELSSPGDIEPGKIDDSYINGITSFDYEIIKAEESLQRDISMNVVFATNYLACATVDTDKDFLLFSKEDIRSCTKKDGNLCKNIMQFWGGYSTWKNFCEEYLKDDKDALELLYSLKSMLYSMRNSSFHFSTENVDNGSWDTELIGKLFEEDCNRAARIEKEKFYNNNLHMFYSSSLLEKVLERLYSSHHERASQVPSFNRVFVRKNFPSSLSEQRITPKFTDSKDEQIWQSAVYYLCKEIYYNDFLQSKEAYKLFREGVKNLDKNDINNQKAADSFKQAVVYYGKAIGNATLSQVCQAIMTEYNRQNNDGLKKKSAYAEKQNSNKYKHYPLFLKQVLQSAFWEYLDENKEIYGFISAQIHKSNVEIKAEDFIANYSSQQYKKLVDKVKKTPELQKWYTLGRLINPRQANQFLGSIRNYVQFVKDIQRRAKENGNPIRNYYEVLESDSIIKILEMCTKLNGTTSNDIHDYFRDEDEYAEYISQFVNFGDVHSGAALNAFCNSESEGKKNGIYYDGINPIVNRNWVLCKLYGSPDLISKIISRVNENMIHDFHKQEDLIREYQIKGICSNKKEQQDLRTFQVLKNRVELRDIVEYSEIINELYGQLIKWCYLRERDLMYFQLGFHYLCLNNASSKEADYIKINVDDRNISGAILYQIAAMYINGLPVYYKKDDMYVALKSGKKASDELNSNEQTSKKINYFLKYGNNILGDKKDQLYLAGLELFENVAEHENIIIFRNEIDHFHYFYDRDRSMLDLYSEVFDRFFTYDMKLRKNVVNMLYNILLDHNIVSSFVFETGEKKVGRGDSEVIKPSAKIRLRANNGVSSDVFTYKVGSKDELKIATLPAKNEEFLLNVARLIYYPDMEAVSENMVREGVVKVEKSNDKKGKISRGSNTRSSNQSKYNNKSKNRMNYSMGSIFEKMDLKFD

SEQ ID NO: 151 - protein, 1437 aa, Lachnospiraceae bacterium
MKISKVREENRGAKLTVNAKTAVVSENRSQEGILYNDPSRYGKSRKNDEDRDRYIESRLKSSGKLYRIFNEDKNKRETDELQWFLSEIVKKINRRNGLVLSDMLSVDDRAFEKAFEKYAELSYTNRRNKVSGSPAFETCGVDAATAERLKGIISETNFINRIKNNIDNKVSEDIIDRIIAKYLKKSLCRERVKRGLKKLLMNAFDLPYSDPDIDVQRDFIDYVLEDFYHVRAKSQVSRSIKNMNMPVQPEGDGKFAITVSKGGTESGNKRSAEKEAFKKFLSDYASLDERVRDDMLRRMRRLVVLYFYGSDDSKLSDVNEKFDVWEDHAARRVDNREFIKLPLENKLANGKTDKDAERIRKNTVKELYRNQNIGCYRQAVKAVEEDNNGRYFDDKMLNMFFIHRIEYGVEKIYANLKQVTEFKARTGYLSEKIWKDLINYISIKYIAMGKAVYNYAMDELNASDKKEIELGKISEEYLSGISSFDYELIKAEEMLQRETAVYVAFAARHLSSQTVELDSENSDFLLLKPKGTMDKNDKNKLASNNILNFLKDKETLRDTILQYFGGHSLWTDFPFDKYLAGGKDDVDFLTDLKDVIYSMRNDSFHYATENHNNGKWNKELISAMFEHETERMTVVMKDKFYSNNLPMFYKNDDLKKLLIDLYKDNVERASQVPSFNKVFVRKNFPALVRDKDNLGIELDLKADADKGENELKFYNALYYMFKEIYYNAFLNDKNVRERFITKATKVADNYDRNKERNLKDRIKSAGSDEKKKLREQLQNYIAENDFGQRIKNIVQVNPDYTLAQICQLIMTEYNQQNNGCMQKKSAARKDINKDSYQHYKMLLLVNLRKAFLEFIKENYAFVLKPYKHDLCDKADFVPDFAKYVKPYAGLISRVAGSSELQKWYIVSRFLSPAQANHMLGFLHSYKQYVWDIYRRASETGTEINHSIAEDKIAGVDITDVDAVIDLSVKLCGTISSEISDYFKDDEVYAEYISSYLDFEYDGGNYKDSLNRFCNSDAVNDQKVALYYDGEHPKLNRNIILSKLYGERRFLEKITDRVSRSDIVEYYKLKKETSQYQTKGIFDSEDEQKNIKKFQEMKNIVEFRDLMDYSEIADELQGQLINWIYLRERDLMNFQLGYHYACLNNDSNKQATYVTLDYQGKKNRKINGAILYQICAMYINGLPLYYVDKDSSEWTVSDGKESTGAKIGEFYRYAKSFENTSDCYASGLEIFENISEHDNITELRNYIEHFRYYSSFDRSFLGIYSEVFDRFFTYDLKYRKNVPTILYNILLQHFVNVRFEFVSGKKMIGIDKKDRKIAKEKECARITIREKNGVYSEQFTYKLKNGTVYVDARDKRYLQSIIRLLFYPEKVNMDEMIEVKEKKKPSDNNTGKGYSKRDRQQDRKEYDKYKEKKKKEGNFLSGMGGNINWDEINAQLKN

SEQ ID NO: 152 - protein, 1385 aa, Clostridium aminophilum
MKFSKVDHTRSAVGIQKATDSVHGMLYTDPKKQEVNDLDKRFDQLNVKAKRLYNVFNQSKAEEDDDEKRFGKVVKKLNRELKDLLFHREVSRYNSIGNAKYNYYGIKSNPEEIVSNLGMVESLKGERDPQKVISKLLLYYLRKGLKPGTDGLRMILEASCGLRKLSGDEKELKVFLQTLDEDFEKKTFKKNLIRSIENQNMAVQPSNEGDPIIGITQGRFNSQKNEEKSAIERMMSMYADLNEDHREDVLRKLRRLNVLYFNVDTEKTEEPTLPGEVDTNPVFEVWHDHEKGKENDRQFATFAKILTEDRETRKKEKLAVKEALNDLKSAIRDHNIMAYRCSIKVTEQDKDGLFFEDQRINRFWIHHIESAVERILASINPEKLYKLRIGYLGEKVWKDLLNYLSIKYIAVGKAVFHFAMEDLGKTGQDIELGKLSNSVSGGLTSFDYEQIRADETLQRQLSVEVAFAANNLFRAVVGQTGKKIEQSKSEENEEDFLLWKAEKIAESIKKEGEGNTLKSILQFFGGASSWDLNHFCAAYGNESSALGYETKFADDLRKAIYSLRNETFHFTTLNKGSFDWNAKLIGDMFSHEAATGIAVERTRFYSNNLPMFYRESDLKRIMDHLYNTYHPRASQVPSFNSVFVRKNFRLFLSNTLNTNTSFDTEVYQKWESGVYYLFKEIYYNSFLPSGDAHHLFFEGLRRIRKEADNLPIVGKEAKKRNAVQDFGRRCDELKNLSLSAICQMIMTEYNEQNNGNRKVKSTREDKRKPDIFQHYKMLLLRTLQEAFAIYIRREEFKFIFDLPKTLYVMKPVEEFLPNWKSGMFDSLVERVKQSPDLQRWYVLCKFLNGRLLNQLSGVIRSYIQFAGDIQRRAKANHNRLYMDNTQRVEYYSNVLEVVDFCIKGTSRFSNVFSDYFRDEDAYADYLDNYLQFKDEKIAEVSSFAALKTFCNEEEVKAGIYMDGENPVMQRNIVMAKLFGPDEVLKNVVPKVTREEIEEYYQLEKQIAPYRQNGYCKSEEDQKKLLRFQRIKNRVEFQTITEFSEIINELLGQLISWSFLRERDLLYFQLGFHYLCLHNDTEKPAEYKEISREDGTVIRNAILHQVAAMYVGGLPVYTLADKKLAAFEKGEADCKLSISKDTAGAGKKIKDFFRYSKYVLIKDRMLTDQNQKYTIYLAGLELFENTDEHDNITDVRKYVDHFKYYATSDENAMSILDLYSEIHDRFFTYDMKYQKNVANMLENILLRHFVLIRPEFFTGSKKVGEGKKITCKARAQIEIAENGMRSEDFTYKLSDGKKNISTCMIAARDQKYLNTVARLLYYPHEAKKSIVDTREKKNNKKTNRGDGTFNKQKGTARKEKDNGPREFNDTGFSNTPFAGFDPFRNS

SEQ ID NO: 153 - protein, 1175 aa, Carnobacterium gallinarum
MRITKVKIKLDNKLYQVTMQKEEKYGTLKLNEESRKSTAEILRLKKASFNKSFHSKTINSQKENKNATIKKNGDYISQIFEKLVGVDTNKNIRKPKMSLTDLKDLPKKDLALFIKRKFKNDDIVEIKNLDLISLFYNALQKVPGEHFTDESWADFCQEMMPYREYKNKFIERKIILLANSIEQNKGFSINPETFSKRKRVLHQWAIEVQERGDFSILDEKLSKLAEIYNFKKMCKRVQDELNDLEKSMKKGKNPEKEKEAYKKQKNFKIKTIWKDYPYKTHIGLIEKIKENEELNQFNIEIGKYFEHYFPIKKERCTEDEPYYLNSETIATTVNYQLKNALISYLMQIGKYKQFGLENQVLDSKKLQEIGIYEGFQTKFMDACVFATSSLKNIIEPMRSGDILGKREFKEAIATSSFVNYHHFFPYFPFELKGMKDRESELIPFGEQTEAKQMQNIWALRGSVQQIRNEIFHSFDKNQKFNLPQLDKSNFEFDASENSTGKSQSYIETDYKFLFEAEKNQLEQFFIERIKSSGALEYYPLKSLEKLFAKKEMKFSLGSQVVAFAPSYKKLVKKGHSYQTATEGTANYLGLSYYNRYELKEESFQAQYYLLKLIYQYVFLPNFSQGNSPAFRETVKAILRINKDEARKKMKKNKKFLRKYAFEQVREMEFKETPDQYMSYLQSEMREEKVRKAEKNDKGFEKNITMNFEKLLMQIFVKGFDVFLTTFAGKELLLSSEEKVIKETEISLSKKINEREKTLKASIQVEHQLVATNSAISYWLFCKLLDSRHLNELRNEMIKFKQSRIKFNHTQHAELIQNLLPIVELTILSNDYDEKNDSQNVDVSAYFEDKSLYETAPYVQTDDRTRVSFRPILKLEKYHTKSLIEALLKDNPQFRVAATDIQEWMHKREEIGELVEKRKNLHTEWAEGQQTLGAEKREEYRDYCKKIDRFNWKANKVTLTYLSQLHYLITDLLGRMVGFSALFERDLVYFSRSFSELGGETYHISDYKNLSGVLRLNAEVKPIKIKNIKVIDNEENPYKGNEPEVKPFLDRLHAYLENVIGIKAVHGKIRNQTAHLSVLQLELSMIESMNNLRDLMAYDRKLKNAVTKSMIKILDKHGMILKLKIDENHKNFEIESLIPKEIIHLKDKAIKTNQVSEEYCQLVLALLTTNPGNQLN

SEQ ID NO: 154 - protein, 1164 aa, Carnobacterium gallinarum
MRMTKVKINGSPVSMNRSKLNGHLVWNGTTNTVNILTKKEQSFAASFLNKTLVKADQVKGYKVLAENIFIIFEQLEKSNSEKPSVYLNNIRRLKEAGLKRFFKSKYHEEIKYTSEKNQSVPTKLNLIPLFFNAVDRIQEDKFDEKNWSYFCKEMSPYLDYKKSYLNRKKEILANSIQQNRGFSMPTAEEPNLLSKRKQLFQQWAMKFQESPLIQQNNFAVEQFNKEFANKINELAAVYNVDELCTAITEKLMNFDKDKSNKTRNFEIKKLWKQHPHNKDKALIKLFNQEGNEALNQFNIELGKYFEHYFPKTGKKESAESYYLNPQTIIKTVGYQLRNAFVQYLLQVGKLHQYNKGVLDSQTLQEIGMYEGFQTKFMDACVFASSSLRNIIQATTNEDILTREKFKKELEKNVELKHDLFFKTEIVEERDENPAKKIAMTPNELDLWAIRGAVQRVRNQIFHQQINKRHEPNQLKVGSFENGDLGNVSYQKTIYQKLFDAEIKDIEIYFAEKIKSSGALEQYSMKDLEKLFSNKELTLSLGGQVVAFAPSYKKLYKQGYFYQNEKTIELEQFTDYDFSNDVFKANYYLIKLIYHYVFLPQFSQANNKLFKDTVHYVIQQNKELNTTEKDKKNNKKIRKYAFEQVKLMKNESPEKYMQYLQREMQEERTIKEAKKTNEEKPNYNFEKLLIQIFIKGFDTFLRNFDLNLNPAEELVGTVKEKAEGLRKRKERIAKILNVDEQIKTGDEEIAFWIFAKLLDARHLSELRNEMIKFKQSSVKKGLIKNGDLIEQMQPILELCILSNDSESMEKESFDKIEVFLEKVELAKNEPYMQEDKLTPVKFRFMKQLEKYQTRNFIENLVIENPEFKVSEKIVLNWHEEKEKIADLVDKRTKLHEEWASKAREIEEYNEKIKKNKSKKLDKPAEFAKFAEYKIICEAIENFNRLDHKVRLTYLKNLHYLMIDLMGRMVGFSVLFERDFVYMGRSYSALKKQSIYLNDYDTFANIRDWEVNENKHLFGTSSSDLTFQETAEFKNLKKPMENQLKALLGVTNHSFEIRNNIAHLHVLRNDGKGEGVSLLSCMNDLRKLMSYDRKLKNAVTKAIIKILDKHGMILKLTNNDHTKPFEIESLKPKKIIHLEKSNHSFPMDQVSQEYCDLVKKMLVFTN

SEQ ID NO: 155 - protein, 1154 aa, Paludibacter propionicigenes
MRVSKVKVKDGGKDKMVLVHRKTTGAQLVYSGQPVSNETSNILPEKKRQSFDLSTLNKTIIKFDTAKKQKLNVDQYKIVEKIFKYPKQELPKQIKAEEILPFLNHKFQEPVKYWKNGKEESFNLTLLIVEAVQAQDKRKLQPYYDWKTWYIQTKSDLLKKSIENNRIDLTENLSKRKKALLAWETEFTASGSIDLTHYHKVYMTDVLCKMLQDVKPLTDDKGKINTNAYHRGLKKALQNHQPAIFGTREVPNEANRADNQLSIYHLEVVKYLEHYFPIKTSKRRNTADDIAHYLKAQTLKTTIEKQLVNAIRANIIQQGKTNHHELKADTTSNDLIRIKTNEAFVLNLTGTCAFAANNIRNMVDNEQTNDILGKGDFIKSLLKDNTNSQLYSFFFGEGLSTNKAEKETQLWGIRGAVQQIRNNVNHYKKDALKTVFNISNFENPTITDPKQQTNYADTIYKARFINELEKIPEAFAQQLKTGGAVSYYTIENLKSLLTTFQFSLCRSTIPFAPGFKKVFNGGINYQNAKQDESFYELMLEQYLRKENFAEESYNARYFMLKLIYNNLFLPGFTTDRKAFADSVGFVQMQNKKQAEKVNPRKKEAYAFEAVRPMTAADSIADYMAYVQSELMQEQNKKEEKVAEETRINFEKFVLQVFIKGFDSFLRAKEFDFVQMPQPQLTATASNQQKADKLNQLEASITADCKLTPQYAKADDATHIAFYVFCKLLDAAHLSNLRNELIKFRESVNEFKFHHLLEIIEICLLSADVVPTDYRDLYSSEADCLARLRPFIEQGADITNWSDLFVQSDKHSPVIHANIELSVKYGTTKLLEQIINKDTQFKTTEANFTAWNTAQKSIEQLIKQREDHHEQWVKAKNADDKEKQERKREKSNFAQKFIEKHGDDYLDICDYINTYNWLDNKMHFVHLNRLHGLTIELLGRMAGFVALFDRDFQFFDEQQIADEFKLHGFVNLHSIDKKLNEVPTKKIKEIYDIRNKIIQINGNKINESVRANLIQFISSKRNYYNNAFLHVSNDEIKEKQMYDIRNHIAHFNYLTKDAADFSLIDLINELRELLHYDRKLKNAVSKAFIDLFDKHGMILKLKLNADHKLKVESLEPKKIYHLGSSAKDKPEYQYCTNQVMMAYCNMCRSLLEMKK

SEQ ID NO: 156 - protein, 970 aa, Listeria weihenstephanensis
MLALLHQEVPSQKLHNLKSLNTESLTKLFKPKFQNMISYPPSKGAEHVQFCLTDIAVPAIRDLDEIKPDWGIFFEKLKPYTDWAESYIHYKQTTIQKSIEQNKIQSPDSPRKLVLQKYVTAFLNGEPLGLDLVAKKYKLADLAESFKVVDLNEDKSANYKIKACLQQHQRNILDELKEDPELNQYGIEVKKYIQRYFPIKRAPNRSKHARADFLKKELIESTVEQQFKNAVYHYVLEQGKMEAYELTDPKTKDLQDIRSGEAFSFKFINACAFASNNLKMILNPECEKDILGKGDFKKNLPNSTTQSDVVKKMIPFFSDEIQNVNFDEAIWAIRGSIQQIRNEVYHCKKHSWKSILKIKGFEFEPNNMKYTDSDMQKLMDKDIAKIPDFIEEKLKSSGIIRFYSHDKLQSIWEMKQGFSLLTTNAPFVPSFKRVYAKGHDYQTSKNRYYDLGLTTFDILEYGEEDFRARYFLTKLVYYQQFMPWFTADNNAFRDAANFVLRLNKNRQQDAKAFINIREVEEGEMPRDYMGYVQGQIAIHEDSTEDTPNHFEKFISQVFIKGFDSHMRSADLKFIKNPRNQGLEQSEIEEMSFDIKVEPSFLKNKDDYIAFWTFCKMLDARHLSELRNEMIKYDGHLTGEQEIIGLALLGVDSRENDWKQFFSSEREYEKIMKGYVGEELYQREPYRQSDGKTPILFRGVEQARKYGTETVIQRLFDASPEFKVSKCNITEWERQKETIEETIERRKELHNEWEKNPKKPQNNAFFKEYKECCDAIDAYNWHKNKTTLVYVNELHHLLIEILGRYVGYVAIADRDFQCMANQYFKHSGITERVEYWGDNRLKSIKKLDTFLKKEGLFVSEKNARNHIAHLNYLSLKSECTLLYLSERLREIFKYDRKLKNAVSKSLIDILDRHGMSVVFANLKENKHRLVIKSLEPKKLRHLGEKKIDNGYIETNQVSEEYCGIVKRLLEI

SEQ ID NO: 157 - protein, 1051 aa, Listeriaceae bacterium
MKITKMRVDGRTIVMERTSKEGQLGYEGIDGNKTTEIIFDKKKESFYKSILNKTVRKPDEKEKNRRKQAINKAINKEITELMLAVLHQEVPSQKLHNLKSLNTESLTKLFKPKFQNMISYPPSKGAEHVQFCLTDIAVPAIRDLDEIKPDWGIFFEKLKPYTDWAESYIHYKQTTIQKSIEQNKIQSPDSPRKLVLQKYVTAFLNGEPLGLDLVAKKYKLADLAESFKLVDLNEDKSANYKIKACLQQHQRNILDELKEDPELNQYGIEVKKYIQRYFPIKRAPNRSKHARADFLKKELIESTVEQQFKNAVYHYVLEQGKMEAYELTDPKTKDLQDIRSGEAFSFKFINACAFASNNLKMILNPECEKDILGKGNFKKNLPNSTTRSDVVKKMIPFFSDELQNVNFDEAIWAIRGSIQQIRNEVYHCKKHSWKSILKIKGFEFEPNNMKYADSDMQKLMDKDIAKIPEFIEEKLKSSGVVRFYRHDELQSIWEMKQGFSLLTTNAPFVPSFKRVYAKGHDYQTSKNRYYNLDLTTFDILEYGEEDFRARYFLTKLVYYQQFMPWFTADNNAFRDAANFVLRLNKNRQQDAKAFINIREVEEGEMPRDYMGYVQGQIAIHEDSIEDTPNHFEKFISQVFIKGFDRHMRSANLKFIKNPRNQGLEQSEIEEMSFDIKVEPSFLKNKDDYIAFWIFCKMLDARHLSELRNEMIKYDGHLTGEQEIIGLALLGVDSRENDWKQFFSSEREYEKIMKGYVVEELYQREPYRQSDGKTPILFRGVEQARKYGTETVIQRLFDANPEFKVSKCNLAEWERQKETIEETIKRRKELHNEWAKNPKKPQNNAFFKEYKECCDAIDAYNWHKNKTTLAYVNELHHLLIEILGRYVGYVAIADRDFQCMANQYFKHSGITERVEYWGDNRLKSIKKLDTFLKKEGLFVSEKNARNHIAHLNYLSLKSECTLLYLSERLREIFKYDRKLKNAVSKSLIDILDRHGMSVVFANLKENKHRLVIKSLEPKKLRHLGGKKIDGGYIETNQVSEEYCGIVKRLLEM

SEQ ID NO: 158 - protein, 1152 aa, Leptotrichia wadei
MKVTKVDGISHKKYIEEGKLVKSTSEENRTSERLSELLSIRLDIYIKNPDNASEEENRIRRENLKKFFSNKVLHLKDSVLYLKNRKEKNAVQDKNYSEEDISEYDLKNKNSFSVLKKILLNEDVNSEELEIFRKDVEAKLNKINSLKYSFEENKANYQKINENNVEKVGGKSKRNIIYDYYRESAKRNDYINNVQEAFDKLYKKEDIEKLFFLIENSKKHEKYKIREYYHKIIGRKNDKENFAKIIYEEIQNVNNIKELIEKIPDMSELKKSQVFYKYYLDKEELNDKNIKYAFCHFVEIEMSQLLKNYVYKRLSNISNDKIKRIFEYQNLKKLIENKLLNKLDTYVRNCGKYNYYLQVGEIATSDFIARNRQNEAFLRNIIGVSSVAYFSLRNILETENENDITGRMRGKTVKNNKGEEKYVSGEVDKIYNENKQNEVKENLKMFYSYDFNMDNKNEIEDFFANIDEAISSIRHGIVHFNLELEGKDIFAFKNIAPSEISKKMFQNEINEKKLKLKIFKQLNSANVFNYYEKDVIIKYLKNTKFNFVNKNIPFVPSFTKLYNKIEDLRNTLKFFWSVPKDKEEKDAQIYLLKNIYYGEFLNKFVKNSKVFFKITNEVIKINKQRNQKTGHYKYQKFENIEKTVPVEYLAIIQSREMINNQDKEEKNTYIDFIQQIFLKGFIDYLNKNNLKYIESNNNNDNNDIFSKIKIKKDNKEKYDKILKNYEKHNRNKEIPHEINEFVREIKLGKILKYTENLNMFYLILKLLNHKELTNLKGSLEKYQSANKEETFSDELELINLLNLDNNRVTEDFELEANEIGKFLDFNENKIKDRKELKKFDTNKIYFDGENIIKHRAFYNIKKYGMLNLLEKIADKAKYKISLKELKEYSNKKNEIEKNYTMQQNLHRKYARPKKDEKFNDEDYKEYEKAIGNIQKYTHLKNKVEFNELNLLQGLLLKILHRLVGYTSIWERDLRFRLKGEFPENHYIEEIFNFDNSKNVKYKSGQIVEKYINFYKELYKDNVEKRSIYSDKKVKKLKQEKKDLYIRNYIAHFNYIPHAEISLLEVLENLRKLLSYDRKLKNAIMKSIVDILKEYGFVATFKIGADKKIEIQTLESEKIVHLKNLKKKKLMTDRNSEELCELVKVMFEYKALE

SEQ ID NO: 159 - protein, 1285 aa, Rhodobacter capsulatus
MQIGKVQGRTISEFGDPAGGLKRKISTDGKNRKELPAHLSSDPKALIGQWISGIDKIYRKPDSRKSDGKAIHSPTPSKMQFDARDDLGEAFWKLVSEAGLAQDSDYDQFKRRLHPYGDKFQPADSGAKLKFEADPPEPQAFHGRWYGAMSKRGNDAKELAAALYEHLHVDEKRIDGQPKRNPKTDKFAPGLVVARALGIESSVLPRGMARLARNWGEEEIQTYFVVDVAASVKEVAKAAVSAAQAFDPPRQVSGRSLSPKVGFALAEHLERVTGSKRCSFDPAAGPSVLALHDEVKKTYKRLCARGKNAARAFPADKTELLALMRHTHENRVRNQMVRMGRVSEYRGQQAGDLAQSHYWTSAGQTEIKESEIFVRLWVGAFALAGRSMKAWIDPMGKIVNTEKNDRDLTAAVNIRQVISNKEMVAEAMARRGIYFGETPELDRLGAEGNEGFVFALLRYLRGCRNQTFHLGARAGFLKEIRKELEKTRWGKAKEAEHVVLTDKTVAAIRAIIDNDAKALGARLLADLSGAFVAHYASKEHFSTLYSEIVKAVKDAPEVSSGLPRLKLLLKRADGVRGYVHGLRDTRKHAFATKLPPPPAPRELDDPATKARYIALLRLYDGPFRAYASGITGTALAGPAARAKEAATALAQSVNVTKAYSDVMEGRTSRLRPPNDGETLREYLSALTGETATEFRVQIGYESDSENARKQAEFIENYRRDMLAFMFEDYIRAKGFDWILKIEPGATAMTRAPVLPEPIDTRGQYEHWQAALYLVMHFVPASDVSNLLHQLRKWEALQGKYELVQDGDATDQADARREALDLVKRFRDVLVLFLKTGEARFEGRAAPFDLKPFRALFANPATFDRLFMATPTTARPAEDDPEGDGASEPELRVARTLRGLRQIARYNHMAVLSDLFAKHKVRDEEVARLAEIEDETQEKSQIVAAQELRTDLHDKVMKCHPKTISPEERQSYAAAIKTIEEHRFLVGRVYLGDHLRLHRLMMDVIGRLIDYAGAYERDTGTFLINASKQLGAGADWAVTIAGAANTDARTQTRKDLAHFNVLDRADGTPDLTALVNRAREMMAYDRKRKNAVPRSILDMLARLGLTLKWQMKDHLLQDATITQAAIKHLDKVRLTVGGPAAVTEARFSQDYLQMVAAVFNGSVQNPKPRRRDDGDAWHKPPKPATAQSQPDQKPPNKAPSAGSRLPPPQVGEVYEGVVVKVIDTGSLGFLAVEGVAGNIGLHISRLRRIREDAIIVGRRYRFRVEIYVPPKSNTSKLNAADLVRID

SEQ ID NO: 160 - protein, 1285 aa, Rhodobacter capsulatus
MQIGKVQGRTISEFGDPAGGLKRKISTDGKNRKELPAHLSSDPKALIGQWISGIDKIYRKPDSRKSDGKAIHSPTPSKMQFDARDDLGEAFWKLVSEAGLAQDSDYDQFKRRLHPYGDKFQPADSGAKLKFEADPPEPQAFHGRWYGAMSKRGNDAKELAAALYEHLHVDEKRIDGQPKRNPKTDKFAPGLVVARALGIESSVLPRGMARLARNWGEEEIQTYFVVDVAASVKEVAKAAVSAAQAFDPPRQVSGRSLSPKVGFALAEHLERVTGSKRCSFDPAAGPSVLALHDEVKKTYKRLCARGKNAARAFPADKTELLALMRHTHENRVRNQMVRMGRVSEYRGQQAGDLAQSHYWTSAGQTEIKESEIFVRLWVGAFALAGRSMKAWIDPMGKIVNTEKNDRDLTAAVNIRQVISNKEMVAEAMARRGIYFGETPELDRLGAEGNEGFVFALLRYLRGCRNQTFHLGARAGFLKEIRKELEKTRWGKAKEAEHVVLTDKTVAAIRAIIDNDAKALGARLLADLSGAFVAHYASKEHFSTLYSEIVKAVKDAPEVSSGLPRLKLLLKRADGVRGYVHGLRDTRKHAFATKLPPPPAPRELDDPATKARYIALLRLYDGPFRAYASGITGTALAGPAARAKEAATALAQSVNVTKAYSDVMEGRSSRLRPPNDGETLREYLSALTGETATEFRVQIGYESDSENARKQAEFIENYRRDMLAFMFEDYIRAKGFDWILKIEPGATAMTRAPVLPEPIDTRGQYEHWQAALYLVMHFVPASDVSNLLHQLRKWEALQGKYELVQDGDATDQADARREALDLVKRFRDVLVLFLKTGEARFEGRAAPFDLKPFRALFANPATFDRLFMATPTTARPAEDDPEGDGASEPELRVARTLRGLRQIARYNHMAVLSDLFAKHKVRDEEVARLAEIEDETQEKSQIVAAQELRTDLHDKVMKCHPKTISPEERQSYAAAIKTIEEHRFLVGRVYLGDHLRLHRLMMDVIGRLIDYAGAYERDTGTFLINASKQLGAGADWAVTIAGAANTDARTQTRKDLAHFNVLDRADGTPDLTALVNRAREMMAYDRKRKNAVPRSILDMLARLGLTLKWQMKDHLLQDATITQAAIKHLDKVRLTVGGPAAVTEARFSQDYLQMVAAVFNGSVQNPKPRRRDDGDAWHKPPKPATAQSQPDQKPPNKAPSAGSRLPPPQVGEVYEGVVVKVIDTGSLGFLAVEGVAGNIGLHISRLRRIREDAIIVGRRYRFRVEIYVPPKSNTSKLNAADLVRID

SEQ ID NO: 161 - protein, 1285 aa, Rhodobacter capsulatus; identical to SEQ ID NO: 160

SEQ ID NO: 162 - protein, 1159 aa, Leptorichia buccalis
MKVTKVGGISHKKYTSEGRLVKSESEENRTDERLSALLNMRLDMYIKNPSSTETKENQKRIGKLKKFFSNKMVYLKDNTLSLKNGKKENIDREYSETDILESDVRDKKNFAVLKKIYLNENVNSEELEVFRNDIKKKLNKINSLKYSFEKNKANYQKINENNIEKVEGKSKRNIIYDYYRESAKRDAYVSNVKEAFDKLYKEEDIAKLVLEIENLTKLEKYKIREFYHEIIGRKNDKENFAKIIYEEIQNVNNMKELIEKVPDMSELKKSQVFYKYYLDKEELNDKNIKYAFCHFVEIEMSQLLKNYVYKRLSNISNDKIKRIFEYQNLKKLIENKLLNKLDTYVRNCGKYNYYLQDGEIATSDFIARNRQNEAFLRNIIGVSSVAYFSLRNILETENENDITGRMRGKTVKNNKGEEKYVSGEVDKIYNENKKNEVKENLKMFYSYDFNMDNKNEIEDFFANIDEAISSIRHGIVHFNLELEGKDIFAFKNIAPSEISKKMFQNEINEKKLKLKIFRQLNSANVFRYLEKYKILNYLKRTRFEFVNKNIPFVPSFTKLYSRIDDLKNSLGIYWKTPKTNDDNKTKEIIDAQIYLLKNIYYGEFLNYFMSNNGNFFEISKEIIELNKNDKRNLKTGFYKLQKFEDIQEKIPKEYLANIQSLYMINAGNQDEEEKDTYIDFIQKIFLKGFMTYLANNGRLSLIYIGSDEETNTSLAEKKQEFDKFLKKYEQNNNIKIPYEINEFLREIKLGNILKYTERLNMFYLILKLLNHKELTNLKGSLEKYQSANKEEAFSDQLELINLLNLDNNRVTEDFELEADEIGKFLDFNGNKVKDNKELKKFDTNKIYFDGENIIKHRAFYNIKKYGMLNLLEKIADKAGYKISIEELKKYSNKKNEIEKNHKMQENLHRKYARPRKDEKFTDEDYESYKQAIENIEEYTHLKNKVEFNELNLLQGLLLRILHRLVGYTSIWERDLRFRLKGEFPENQYIEEIFNFENKKNVKYKGGQIVEKYIKFYKELHQNDEVKINKYSSANIKVLKQEKKDLYIRNYIAHFNYIPHAEISLLEVLENLRKLLSYDRKLKNAVMKSVVDILKEYGFVATFKIGADKKIGIQTLESEKIVHLKNLKKKKLMTDRNSEELCKLVKIMFEYKMEEKKSEN

SEQ ID NO: 163 - protein, 1285 aa, Herbinix hemicellulosilytica
MKLTRRRISGNSVDQKITAAFYRDMSQGLLYYDSEDNDCTDKVIESMDFERSWRGRILKNGEDDKNPFYMFVKGLVGSNDKIVCEPIDVDSDPDNLDILINKNLTGFGRNLKAPDSNDTLENLIRKIQAGIPEEEVLPELKKIKEMIQKDIVNRKEQLLKSIKNNRIPFSLEGSKLVPSTKKMKWLFKLIDVPNKTFNEKMLEKYWEIYDYDKLKANITNRLDKTDKKARSISRAVSEELREYHKNLRTNYNRFVSGDRPAAGLDNGGSAKYNPDKEEFLLFLKEVEQYFKKYFPVKSKHSNKSKDKSLVDKYKNYCSYKVVKKEVNRSIINQLVAGLIQQGKLLYYFYYNDTWQEDFLNSYGLSYIQVEEAFKKSVMTSLSWGINRLTSFFIDDSNTVKFDDITTKKAKEAIESNYFNKLRTCSRMQDHFKEKLAFFYPVYVKDKKDRPDDDIENLIVLVKNAIESVSYLRNRTFHFKESSLLELLKELDDKNSGQNKIDYSVAAEFIKRDIENLYDVFREQIRSLGIAEYYKADMISDCFKTCGLEFALYSPKNSLMPAFKNVYKRGANLNKAYIRDKGPKETGDQGQNSYKALEEYRELTWYIEVKNNDQSYNAYKNLLQLIYYHAFLPEVRENEALITDFINRTKEWNRKETEERLNTKNNKKHKNFDENDDITVNTYRYESIPDYQGESLDDYLKVLQRKQMARAKEVNEKEEGNNNYIQFIRDVVVWAFGAYLENKLKNYKNELQPPLSKENIGLNDTLKELFPEEKVKSPFNIKCRFSISTFIDNKGKSTDNTSAEAVKTDGKEDEKDKKNIKRKDLLCFYLFLRLLDENEICKLQHQFIKYRCSLKERRFPGNRTKLEKETELLAELEELMELVRFTMPSIPEISAKAESGYDTMIKKYFKDFIEKKVFKNPKTSNLYYHSDSKTPVTRKYMALLMRSAPLHLYKDIFKGYYLITKKECLEYIKLSNIIKDYQNSLNELHEQLERIKLKSEKQNGKDSLYLDKKDFYKVKEYVENLEQVARYKHLQHKINFESLYRIFRIHVDIAARMVGYTQDWERDMHFLFKALVYNGVLEERRFEAIFNNNDDNNDGRIVKKIQNNLNNKNRELVSMLCWNKKLNKNEFGAIIWKRNPIAHLNHFTQTEQNSKSSLESLINSLRILLAYDRKRQNAVTKTINDLLLNDYHIRIKWEGRVDEGQIYFNIKEKEDIENEPIIHLKHLHKKDCYIYKNSYMFDKQKEWICNGIKEEVYDKSILKCIGNLFKFDYEDKNKSSANPKHT

SEQ ID NO: 164 - protein, 1344 aa, Eubacterium rectale
MLRRDKEVKKLYNVFNQIQVGTKPKKWNNDEKLSPEENERRAQQKNIKMKNYKWREACSKYVESSQRIINDVIFYSYRKAKNKLRYMRKNEDILKKMQEAEKLSKFSGGKLEDFVAYTLRKSLVVSKYDTQEFDSLAAMVVFLECIGKNNISDHEREIVCKLLELIRKDFSKLDPNVKGSQGANIVRSVRNQNMIVQPQGDRFLFPQVYAKENETVTNKNVEKEGLNEFLLNYANLDDEKRAESLRKLRRILDVYFSAPNHYEKDMDITLSDNIEKEKFNVWEKHECGKKETGLFVDIPDVLMEAEAENIKLDAVVEKRERKVLNDRVRKQNIICYRYTRAVVEKYNSNEPLFFENNAINQYWIHHIENAVERILKNCKAGKLFKLRKGYLAEKVWKDAINLISIKYIALGKAVYNFALDDIWKDKKNKELGIVDERIRNGITSFDYEMIKAHENLQRELAVDIAFSVNNLARAVCDMSNLGNKESDFLLWKRNDIADKLKNKDDMASVSAVLQFFGGKSSWDINIFKDAYKGKKKYNYEVRFIDDLRKAIYCARNENFHFKTALVNDEKWNTELFGKIFERETEFCLNVEKDRFYSNNLYMFYQVSELRNMLDHLYSRSVSRAAQVPSYNSVIVRTAFPEYITNVLGYQKPSYDADTLGKWYSACYYLLKEIYYNSFLQSDRALQLFEKSVKTLSWDDKKQQRAVDNFKDHFSDIKSACTSLAQVCQIYMTEYNQQNNQIKKVRSSNDSIFDQPVYQHYKVLLKKAIANAFADYLKNNKDLFGFIGKPFKANEIREIDKEQFLPDWTSRKYEALCIEVSGSQELQKWYIVGKFLNARSLNLMVGSMRSYIQYVTDIKRRAASIGNELHVSVHDVEKVEKWVQVIEVCSLLASRTSNQFEDYFNDKDDYARYLKSYVDFSNVDMPSEYSALVDFSNEEQSDLYVDPKNPKVNRNIVHSKLFAADHILRDIVEPVSKDNIEEFYSQKAEIAYCKIKGKEITAEEQKAVLKYQKLKNRVELRDIVEYGEIINELLGQLINWSFMRERDLLYFQLGFHYDCLRNDSKKPEGYKNIKVDENSIKDAILYQIIGMYVNGVTVYAPEKDGDKLKEQCVKGGVGVKVSAFHRYSKYLGLNEKTLYNAGLEIFEVVAEHEDIINLRNGIDHFKYYLGDYRSMLSIYSEVFDRFFTYDIKYQKNVLNLLQNILLRHNVIVEPILESGFKTIGEQTKPGAKLSIRSIKSDTFQYKVKGGTLITDAKDERYLETIRKILYYAENEEDNLKKSVVVTNADKYEKNKESDDQNKQKEKKNKDNKGKKNEETKSDAEKNNNERLSYNPFANLNFKLSN

SEQ ID NO: 165 - protein, 1373 aa, Eubacteriaceae bacterium
MKISKESHKRTAVAVMEDRVGGVVYVPGGSGIDLSNNLKKRSMDTKSLYNVFNQIQAGTAPSEYEWKDYLSEAENKKREAQKMIQKANYELRRECEDYAKKANLAVSRIIFSKKPKKIFSDDDIISHMKKQRLSKFKGRMEDFVLIALRKSLVVSTYNQEVFDSRKAATVFLKNIGKKNISADDERQIKQLMALIREDYDKWNPDKDSSDKKESSGTKVIRSIEHQNMVIQPEKNKLSLSKISNVGKKTKTKQKEKAGLDAFLKEYAQIDENSRMEYLKKLRRLLDTYFAAPSSYIKGAAVSLPENINFSSELNVWERHEAAKKVNINFVEIPESLLNAEQNNNKINKVEQEHSLEQLRTDIRRRNITCYHFANALAADERYHTLFFENMAMNQFWIHHMENAVERILKKCNVGTLFKLRIGYLSEKVWKDMLNLLSIKYIALGKAVYHFALDDIWKADIWKDASDKNSGKINDLTLKGISSFDYEMVKAQEDLQREMAVGVAFSTNNLARVTCKMDDLSDAESDFLLWNKEAIRRHVKYTEKGEILSAILQFFGGRSLWDESLFEKAYSDSNYELKFLDDLKRAIYAARNETFHFKTAAIDGGSWNTRLFGSLFEKEAGLCLNVEKNKFYSNNLVLFYKQEDLRVFLDKLYGKECSRAAQIPSYNTILPRKSFSDFMKQLLGLKEPVYGSAILDQWYSACYYLFKEVYYNLFLQDSSAKALFEKAVKALKGADKKQEKAVESFRKRYWEISKNASLAEICQSYITEYNQQNNKERKVRSANDGMFNEPIYQHYKMLLKEALKMAFASYIKNDKELKFVYKPTEKLFEVSQDNFLPNWNSEKYNTLISEVKNSPDLQKWYIVGKFMNARMLNLLLGSMRSYLQYVSDIQKRAAGLGENQLHLSAENVGQVKKWIQVLEVCLLLSVRISDKFTDYFKDEEEYASYLKEYVDFEDSAMPSDYSALLAFSNEGKIDLYVDASNPKVNRNIIQAKLYAPDMVLKKVVKKISQDECKEFNEKKEQIMQFKNKGDEVSWEEQQKILEYQKLKNRVELRDLSEYGELINELLGQLINWSYLRERDLLYFQLGFHYSCLMNESKKPDAYKTIRRGTVSIENAVLYQIIAMYINGFPVYAPEKGELKPQCKTGSAGQKIRAFCQWASMVEKKKYELYNAGLELFEVVKEHDNIIDLRNKIDHFKYYQGNDSILALYGEIFDRFFTYDMKYRNNVLNHLQNILLRHNVIIKPIISKDKKEVGRGKMKDRAAFLLEEVSSDRFTYKVKEGERKIDAKNRLYLETVRDILYFPNRAVNDKGEDVIICSKKAQDLNEKKADRDKNHDKSKDTNQKKEGKNQEEKSENKEPYSDRMTWKPFAGIKLE

SEQ ID NO: 166 - protein, 1276 aa, Blautia species
MKISKVDHVKSGIDQKLSSQRGMLYKQPQKKYEGKQLEEHVRNLSRKAKALYQVFPVSGNSKMEKELQIINSFIKNILLRLDSGKTSEEIVGYINTYSVASQISGDHIQELVDQHLKESLRKYTCVGDKRIYVPDIIVALLKSKFNSETLQYDNSELKILIDFIREDYLKEKQIKQIVHSIENNSTPLRIAEINGQKRLIPANVDNPKKSYIFEFLKEYAQSDPKGQESLLQHMRYLILLYLYGPDKITDDYCEEIEAWNFGSIVMDNEQLFSEEASMLIQDRIYVNQQIEEGRQSKDTAKVKKNKSKYRMLGDKIEHSINESVVKHYQEACKAVEEKDIPWIKYISDHVMSVYSSKNRVDLDKLSLPYLAKNTWNTWISFIAMKYVDMGKGVYHFAMSDVDKVGKQDNLIIGQIDPKFSDGISSFDYERIKAEDDLHRSMSGYIAFAVNNFARAICSDEFRKKNRKEDVLTVGLDEIPLYDNVKRKLLQYFGGASNWDDSIIDIIDDKDLVACIKENLYVARNVNFHFAGSEKVQKKQDDILEEIVRKETRDIGKHYRKVFYSNNVAVFYCDEDIIKLMNHLYQREKPYQAQIPSYNKVISKTYLPDLIFMLLKGKNRTKISDPSIMNMFRGTFYFLLKEIYYNDFLQASNLKEMFCEGLKNNVKNKKSEKPYQNFMRRFEELENMGMDFGEICQQIMTDYEQQNKQKKKTATAVMSEKDKKIRTLDNDTQKYKHFRTLLYIGLREAFIIYLKDEKNKEWYEFLREPVKREQPEEKEFVNKWKLNQYSDCSELILKDSLAAAWYVVAHFINQAQLNHLIGDIKNYIQFISDIDRRAKSTGNPVSESTEIQIERYRKILRVLEFAKFFCGQITNVLTDYYQDENDFSTHVGHYVKFEKKNMEPAHALQAFSNSLYACGKEKKKAGFYYDGMNPIVNRNITLASMYGNKKLLENAMNPVTEQDIRKYYSLMAELDSVLKNGAVCKSEDEQKNLRHFQNLKNRIELVDVLTLSELVNDLVAQLIGWVYIRERDMMYLQLGLHYIKLYFTDSVAEDSYLRTLDLEEGSIADGAVLYQIASLYSFNLPMYVKPNKSSVYCKKHVNSVATKFDIFEKEYCNGDETVIENGLRLFENINLHKDMVKFRDYLAHFKYFAKLDESILELYSKAYDFFFSYNIKLKKSVSYVLTNVLLSYFINAKLSFSTYKSSGNKTVQHRTTKISVVAQTDYFTYKLRSIVKNKNGVESIENDDRRCEVVNIAARDKEFVDEVCNVINYNSDK

SEQ ID NO: 167 - protein, 1385 aa, Leptotrichia species
MGNLFGHKRWYEVRDKKDFKIKRKVKVKRNYDGNKYILNINENNNKEKIDNNKFIGEFVNYKKNNNVLKEFKRKFHAGNILFKLKGKEEIIRIENNDDFLETEEVVLYIEVYGKSEKLKALEITKKKIIDEAIRQGITKDDKKIEIKRQENEEEIEIDIRDEYTNKTLNDCSIILRIIENDELETKKSIYEIFKNINMSLYKIIEKIIENETEKVFENRYYEEHLREKLLKDNKIDVILTNFMEIREKIKSNLEIMGFVKFYLNVSGDKKKSENKKMFVEKILNTNVDLTVEDIVDFIVKELKFWNITKRIEKVKKFNNEFLENRRNRTYIKSYVLLDKHEKFKIERENKKDKIVKFFVENIKNNSIKEKIEKILAEFKINELIKKLEKELKKGNCDTEIFGIFKKHYKVNFDSKKFSNKSDEEKELYKIIYRYLKGRIEKILVNEQKVRLKKMEKIEIEKILNESILSEKILKRVKQYTLEHIMYLGKLRHNDIVKMTVNTDDFSRLHAKEELDLELITFFASTNMELNKIFNGKEKVTDFFGFNLNGQKITLKEKVPSFKLNILKKLNFINNENNIDEKLSHFYSFQKEGYLLRNKILHNSYGNIQETKNLKGEYENVEKLIKELKVSDEEISKSLSLDVIFEGKVDIINKINSLKIGEYKDKKYLPSFSKIVLEITRKFREINKDKLFDIESEKIILNAVKYVNKILYEKITSNEENEFLKTLPDKLVKKSNNKKENKNLLSIEEYYKNAQVSSSKGDKKAIKKYQNKVTNAYLEYLENTFTEIIDFSKFNLNYDEIKTKIEERKDNKSKIIIDSISTNINITNDIEYIISIFALLNSNTYINKIRNRFFATSVWLEKQNGTKEYDYENIISILDEVLLINLLRENNITDILDLKNAIIDAKIVENDETYIKNYIFESNEEKLKKRLFCEELVDKEDIRKIFEDENFKFKSFIKKNEIGNFKINFGILSNLECNSEVEAKKIIGKNSKKLESFIQNIIDEYKSNIRTLFSSEFLEKYKEEIDNLVEDTESENKNKFEKIYYPKEHKNELYIYKKNLFLNIGNPNFDKIYGLISKDIKNVDTKILFDDDIKKNKISEIDAILKNLNDKLNGYSNDYKAKYVNKLKENDDFFAKNIQNENYSSFGEFEKDYNKVSEYKKIRDLVEFNYLNKIESYLIDINWKLAIQMARFERDMHYIVNGLRELGIIKLSGYNTGISRAYPKRNGSDGFYTTTAYYKFFDEESYKKFEKICYGFGIDLSENSEINKPENESIRNYISHFYIVRNPFADYSIAEQIDRVSNLLSYSTRYNNSTYASVFEVFKKDVNLDYDELKKKFRLIGNNDILERLMKPKKVSVLELESYNSDYIKNLIIELLTKIENTNDTL

SEQ ID NO: 168 - protein, 500 aa, Chloroflexus aggregans
MTDQVRREEVAAGELADTPLAAAQTPAADAAVAATPAPAEAVAPTPEQAVDQPATTGESEAPVTTAQAAAHEAEPAEATGASFTPVSEQQPQKPRRLKDLQPGMELEGKVTSIALYGIFVDVGVGRDGLVHISEMSDRRIDTPSELVQIGDTVKVWVKSVDLDARRISLTMLNPSRGEKPRRSRQSQPAQPQPRRQEVDREKLASLKVGEIVEGVITGFAPFGAFADIGVGKDGLIHISELSEGRVEKPEDAVKVGERYQFKVLEIDGEGTRISLSLRRAQRTQRMQQLEPGQIIEGTVSGIATFGAFVDIGVGRDGLVHISALAPHRVAKVEDVVKVGDKVKVKVLGVDPQSKRISLTMRLEEEQPATTAGDEAAEPAEEVTPTRRGNLERFAAAAQTARERSERGERSERGERRERRERRPAQSSPDTYIVGEDDDESFEGNATIEDLLTKFGGSSSRRDRDRRRRHEDDDDEEMERPSNRRQREAIRRTLQQIGYDE

SEQ ID NO: 169 - protein, 249 aa, Demequina aurantiaca
MDLTWHALLILFIVALLAGFLDTLAGGGGLLTVPALLLTGIPPLQALGTNKLQSSFGTGMATYQVIRKKRVHWRDVRWPMVWAFLGSAAGAVAVQFIDTDALLIIIPVVLALVAAYFLFVPKSHLPPPEPRMSDPAYEATLVPIIGAYDGAFGPGTGSLYALSGVALRAKTLVQSTAIAKTLNFATNFAALLVFAFAGHMLWTVGAVMIAGQLIGAYAGSHMLFRVNPLVLRVLIVVMSLGMLIRVLLD

SEQ ID NO: 170 - protein, 1235 aa, Thalassospira species
MRIIKPYGRSHVEGVATQEPRRKLRLNSSPDISRDIPGFAQSHDALIIAQWISAIDKIATKPKPDKKPTQAQINLRTTLGDAAWQHVMAENLLPAATDPAIREKLHLIWQSKIAPWGTARPQAEKDGKPTPKGGWYERFCGVLSPEAITQNVARQIAKDIYDHLHVAAKRKGREPAKQGESSNKPGKFKPDRKRGLIEERAESIAKNALRPGSHAPCPWGPDDQATYEQAGDVAGQIYAAARDCLEEKKRRSGNRNTSSVQYLPRDLAAKILYAQYGRVFGPDTTIKAALDEQPSLFALHKAIKDCYHRLINDARKRDILRILPRNMAALFRLVRAQYDNRDINALIRLGKVIHYHASEQGKSEHHGIRDYWPSQQDIQNSRFWGSDGQADIKRHEAFSRIWRHIIALASRTLHDWADPHSQKFSGENDDILLLAKDAIEDDVFKAGHYERKCDVLFGAQASLFCGAEDFEKAILKQAITGTGNLRNATFHFKGKVRFEKELQELTKDVPVEVQSAIAALWQKDAEGRTRQIAETLQAVLAGHFLTEEQNRHIFAALTAAMAQPGDVPLPRLRRVLARHDSICQRGRILPLSPCPDRAKLEESPALTCQYTVLKMLYDGPFRAWLAQQNSTILNHYIDSTIARTDKAARDMNGRKLAQAEKDLITSRAADLPRLSVDEKMGDFLARLTAATATEMRVQRGYQSDGENAQKQAAFIGQFECDVIGRAFADFLNQSGFDFVLKLKADTPQPDAAQCDVTALIAPDDISVSPPQAWQQVLYFILHLVPVDDASHLLHQIRKWQVLEGKEKPAQIAHDVQSVLMLYLDMHDAKFTGGAALHGIEKFAEFFAHAADFRAVFPPQSLQDQDRSIPRRGLREIVRFGHLPLLQHMSGTVQITHDNVVAWQAARTAGATGMSPIARRQKQREELHALAVERTARFRNADLQNYMHALVDVIKHRQLSAQVTLSDQVRLHRLMMGVLGRLVDYAGLWERDLYFVVLALLYHHGATPDDVFKGQGKKNLADGQVVAALKPKNRKAAAPVGVFDDLDHYGIYQDDRQSIRNGLSHFNMLRGGKAPDLSHWVNQTRSLVAHDRKLKNAVAKSVIEMLAREGFDLDWGIQTDRGQHILSHGKIRTRQAQHFQKSRLHIVKKSAKPDKNDTVKIRENLHGDAMVERVVQLFAAQVQKRYDITVEKRLDHLFLKPQDQKGKNGIHTHNGWSKTEKKRRPSRENRKGNHEN

SEQ ID NO: 171 - protein, 1312 aa, Pseudobutyrivibrio species
MKFSKESHRKTAVGVTESNGIIGLLYKDPLNEKEKIEDVVNQRANSTKRLFNLFGTEATSKDISRASKDLAKVVNKAIGNLKGNKKFNKKEQITKGLNTKIIVEELKNVLKDEKKLIVNKDIIDEACSRLLKTSFRTAKTKQAVKMILTAVLIENTNLSKEDEAFVHEYFVKKLVNEYNKTSVKKQIPVALSNQNMVIQPNSVNGTLEISETKKSKETKTTEKDAFRAFLRDYATLDENRRHKMRLCLRNLVNLYFYGETSVSKDDFDEWRDHEDKKQNDELFVKKIVSIKTDRKGNVKEVLDVDATIDAIRTNNIACYRRALAYANENPDVFFSDTMLNKFWIHHVENEVERIYGHINNNTGDYKYQLGYLSEKVWKGIINYLSIKYIAEGKAVYNYAMNALAKDNNSNAFGKLDEKFVNGITSFEYERIKAEETLQRECAVNIAFAANHLANATVDLNEKDSDFLLLKHEDNKDTLGAVARPNILRNILQFFGGKSRWNDFDFSGIDEIQLLDDLRKMIYSLRNSSFHFKTENIDNDSWNTKLIGDMFAYDFNMAGNVQKDKMYSNNVPMFYSTSDIEKMLDRLYAEVHERASQVPSFNSVFVRKNFPDYLKNDLKITSAFGVDDALKWQSAVYYVCKEIYYNDFLQNPETFTMLKDYVQCLPIDIDKSMDQKLKSERNAHKNFKEAFATYCKECDSLSAICQMIMTEYNNQNKGNRKVISARTKDGDKLIYKHYKMILFEALKNVFTIYLEKNINTYGFLKKPKLINNVPAIEEFLPNYNGRQYETLVNRITEETELQKWYIVGRLLNPKQVNQLIGNFRSYVQYVNDVARRAKQTGNNLSNDNIAWDVKNIIQIFDVCTKLNGVTSNILEDYFDDGDDYARYLKNFVDYTNKNNDHSATLLGDFCAKEIDGIKIGIYHDGTNPIVNRNIIQCKLYGATGIISDLTKDGSILSVDYEIIKKYMQMQKEIKVYQQKGICKTKEEQQNLKKYQELKNIVELRNIIDYSEILDELQGQLINWGYLRERDLMYFQLGFHYLCLHNESKKPVGYNNAGDISGAVLYQIVAMYTNGLSLIDANGKSKKNAKASAGAKVGSFCSYSKEIRGVDKDTKEDDDPIYLAGVELFENINEHQQCINLRNYIEHFHYYAKHDRSMLDLYSEVFDRFFTYDMKYTKNVPNMMYNILLQHLVVPAFEFGSSEKRLDDNDEQTKPRAMFTLREKNGLSSEQFTYRLGDGNSTVKLSARGDDYLRAVASLLYYPDRAPEGLIRDAEAEDKFAKINHSNPKSDNRNNRGNFKNPKVQWYNNKTKRK

SEQ ID NO: 172 - protein, 1276 aa, Blautia species; identical to SEQ ID NO: 166

SEQ ID NO: 173 - protein, 1168 aa, Leptotrichia species
MKITKIDGISHKKYIKEGKLVKSTSEENKTDERLSELLTIRLDTYIKNPDNASEEENRIRRENLKEFFSNKVLYLKDGILYLKDRREKNQLQNKNYSEEDISEYDLKNKNNFLVLKKILLNEDINSEELEIFRNDFEKKLDKINSLKYSLEENKANYQKINENNIKKVEGKSKRNIFYNYYKDSAKRNDYINNIQEAFDKLYKKEDIENLFFLIENSKKHEKYKIRECYHKIIGRKNDKENFATIIYEEIQNVNNMKELIEKVPNVSELKKSQVFYKYYLNKEKLNDENIKYVFCHFVEIEMSKLLKNYVYKKPSNISNDKVKRIFEYQSLKKLIENKLLNKLDTYVRNCGKYSFYLQDGEIATSDFIVGNRQNEAFLRNIIGVSSTAYFSLRNILETENENDITGRMRGKTVKNNKGEEKYISGEIDKLYDNNKQNEVKKNLKMFYSYDFNMNSKKEIEDFFSNIDEAISSIRHGIVHFNLELEGKDIFTFKNIVPSQISKKMFHDEINEKKLKLKIFKQLNSANVFRYLEKYKILNYLNRTRFEFVNKNIPFVPSFTKLYSRIDDLKNSLGIYWKTPKTNDDNKTKEITDAQIYLLKNIYYGEFLNYFMSNNGNFFEITKEIIELNKNDKRNLKTGFYKLQKFENLQEKTPKEYLANIQSLYMINAGNQDEEEKDTYIDFIQKIFLKGFMTYLANNGRLSLIYIGSDEETNTSLAEKKQEFDKFLKKYEQNNNIEIPYEINEFVREIKLGKILKYTERLNMFYLILKLLNHKELTNLKGSLEKYQSANKEEAFSDQLELINLLNLDNNRVTEDFELEADEIGKFLDFNGNKVKDNKELKKFDTNKIYFDGENIIKHRAFYNIKKYGMLNLLEKISDEAKYKISIEELKNYSKKKNEIEENHTTQENLHRKYARPRKDEKFTDEDYKKYEKAIRNIQQYTHLKNKVEFNELNLLQSLLLRILHRLVGYTSIWERDLRFRLKGEFPENQYIEEIFNFDNSKNVKYKNGQIVEKYINFYKELYKDDTEKISIYSDKKVKELKKEKKDLYIRNYIAHFNYIPNAEISLLEMLENLRKLLSYDRKLKNAIMKSIVDILKEYGFVVTFKIEKDKKIRIESLKSEEVVHLKKLKLKDNDKKKEPIKTYRNSKELCKLVKVMFEYKMKEKKSEN

SEQ ID NO: 174 - protein, 1138 aa, Bacteroides ihuae
MRITKVKVKESSDQKDKMVLIHRKVGEGTLVLDENLADLTAPIIDKYKDKSFELSLLKQTLVSEKEMNIPKCDKCTAKERCLSCKQREKRLKEVRGAIEKTIGAVIAGRDIIPRLNIFNEDEICWLIKPKLRNEFTFKDVNKQVVKLNLPKVLVEYSKKNDPTLFLAYQQWIAAYLKNKKGHIKKSILNNRVVIDYSDESKLSKRKQALELWGEEYETNQRIALESYHTSYNIGELVTLLPNPEEYVSDKGEIRPAFHYKLKNVLQMHQSTVFGTNEILCINPIFNENRANIQLSAYNLEVVKYFEHYFPIKKKKKNLSLNQAIYYLKVETLKERLSLQLENALRMNLLQKGKIKKHEFDKNTCSNTLSQIKRDEFFVLNLVEMCAFAANNIRNIVDKEQVNEILSKKDLCNSLSKNTIDKELCTKFYGADFSQIPVAIWAMRGSVQQIRNEIVHYKAEAIDKIFALKTFEYDDMEKDYSDTPFKQYLELSIEKIDSFFIEQLSSNDVLNYYCTEDVNKLLNKCKLSLRRTSIPFAPGFKTIYELGCHLQDSSNTYRIGHYLMLIGGRVANSTVTKASKAYPAYRFMLKLIYNHLFLNKFLDNHNKRFFMKAVAFVLKDNRENARNKFQYAFKEIRMMNNDESIASYMSYIHSLSVQEQEKKGDKNDKVRYNTEKFIEKVFVKGFDDFLSWLGVEFILSPNQEERDKTVTREEYENLMIKDRVEHSINSNQESHIAFFTFCKLLDANHLSDLRNEWIKFRSSGDKEGFSYNFAIDIIELCLLTVDRVEQRRDGYKEQTELKEYLSFFIKGNESENTVWKGFYFQQDNYTPVLYSPIELIRKYGTLELLKLIIVDEDKITQGEFEEWQTLKKVVEDKVTRRNELHQEWEDMKNKSSFSQEKCSIYQKLCRDIDRYNWLDNKLHLVHLRKLHNLVIQILSRMARFIALWDRDFVLLDASRANDDYKLLSFFNFRDFINAKKTKTDDELLAEFGSKIEKKNAPFIKAEDVPLMVECIEAKRSFYQKVFFRNNLQVLADRNFIAHYNYISKTAKCSLFEMIIKLRTLMYYDRKLRNAVVKSIANVFDQNGMVLQLSLDDSHELKVDKVISKRIVHLKNNNIMTDQVPEEYYKICRRLLEMKK

SEQ ID NO: 175 - protein, 204 aa, Listeria riparia
MHDAWAENPKKPQSDAFLKEYKACCEAIDTYNWHKNKATLVYVNELHHLLIDILGRLVGYVAIADRDFQCMANQYLKSSGHTERVDSWINTIRKNRPDYIEKLDIFMNKAGLFVSEKNGRNYIAHLNYLSPKHKYSLLYLFEKLREMLKYDRKLKNAVTKSLIDLLDKHGMCVVFANLKNNKHRLVIASLKPKKIETFKWKKIK

SEQ ID NO: 176 - protein, 1082 aa, Insolitispirillum peregrinum
MRIIRPYGSSTVASPSPQDAQPLRSLQRQNGTFDVAEFSRRHPELVLAQWVAMLDKIIRKPAPGKNSTALPRPTAEQRRLRQQVGAALWAEMQRHTPVPPELKAVWDSKVHPYSKDNAPATAKTPSHRGRWYDRFGDPETSAATVAEGVRRHLLDSAQPFRANGGQPKGKGVIEHRALTIQNGTLLHHHQSEKAGPLPEDWSTYRADELVSTIGKDARWIKVAASLYQHYGRIFGPTTPISEAQTRPEFVLHTAVKAYYRRLFKERKLPAERLERLLPRTGEALRHAVTVQHGNRSLADAVRIGKILHYGWLQNGEPDPWPDDAALYSSRYWGSDGQTDIKHSEAVSRVWRRALTAAQRTLTSWLYPAGTDAGDILLIGQKPDSIDRNRLPLLYGDSTRHWTRSPGDVWLFLKQTLENLRNSSFHFKTLSAFTSHLDGTCESEPAEQQAAQALWQDDRQQDHQQVFLSLRALDATTYLPTGPLHRIVNAVQSTDATLPLPRFRRVVTRAANTRLKGFPVEPVNRRTMEDDPLLRCRYGVLKLLYERGFRAWLETRPSIASCLDQSLKRSTKAAQTINGKNSPQGVEILSRATKLLQAEGGGGHGIHDLFDRLYAATAREMRVQVGYHHDAEAARQQAEFIEDLKCEVVARAFCAYLKTLGIQGDTFRRQPEPLPTWPDLPDLPSSTIGTAQAALYSVLHLMPVEDVGSLLHQLRRWLVALQARGGEDGTAITATIPLLELYLNRHDAKFSGGGAGTGLRWDDWQVFFDCQATFDRVFPPGPALDSHRLPLRGLREVLRFGRVNDLAALIGQDKITAAEVDRWHTAEQTIAAQQQRREALHEQLSRKKGTDAEVDEYRALVTAIADHRHLTAHVTLSNVVRLHRLMTTVLGRLVDYGGLWERDLTFVTLYEAHRLGGLRNLLSESRVNKFLDGQTPAALSKKNNAEENGMISKVLGDKARRQIRNDFAHFNMLQQGKKTINLTDEINNARKLMAHDRKLKNAITRSVTTLLQQDGLDIVWTMDASHRLTDAKIDSRNAIHLHKTHNRANIREPLHGKSYCRWVAALFGATSTPSATKKSDKIR

SEQ ID NO: 177 - protein, 1001 aa, Bacterial consensus sequence
  misc_feature (7)..(9): Xaa can be any naturally occurring amino acid
  misc_feature (11)..(11): Xaa can be any naturally occurring amino acid
  misc_feature (14)..(16): Xaa can be any naturally occurring amino acid
  misc_feature (20)..(20): Xaa can be any naturally occurring amino acid
  misc_feature (22)..(22): Xaa can be any naturally occurring amino acid
  misc_feature (29)..(29): Xaa can be any naturally occurring amino acid
  misc_feature (36)..(36): Xaa can be any naturally occurring amino acid
  misc_feature (42)..(43): Xaa can be any naturally occurring amino acid
  misc_feature (48)..(48): Xaa can be any naturally occurring amino acid
  misc_feature (52)..(53): Xaa can be any naturally occurring amino acid
  misc_feature (57)..(57): Xaa can be any naturally occurring amino acid
  misc_feature (59)..(59): Xaa can be any naturally occurring amino acid
  misc_feature (69)..(71): Xaa can be any naturally occurring amino acid
  misc_feature (73)..(73): Xaa can be any naturally occurring amino acid
  misc_feature (75)..(75): Xaa can be any naturally occurring amino acid
  misc_feature (78)..(79): Xaa can be any naturally occurring amino acid
  misc_feature (86)..(86): Xaa can be any naturally occurring amino acid
  misc_feature (89)..(89): Xaa can be any naturally occurring amino acid
  MISC_FEATURE (90)..(90): Xaa = I or L
  misc_feature (101)..(101): Xaa can be any naturally occurring amino acid
  misc_feature (104)..(104): Xaa can be any naturally occurring amino acid
  misc_feature (111)..(111): Xaa can be any naturally occurring amino acid
  misc_feature (116)..(116): Xaa can be any naturally occurring amino acid
  misc_feature (121)..(121): Xaa can be any naturally occurring amino acid
  misc_feature (128)..(130): Xaa can be any naturally occurring amino acid
  misc_feature (133)..(133): Xaa can be any naturally occurring amino acid
  misc_feature (145)..(145): Xaa can be any naturally occurring amino acid
  misc_feature (148)..(148): Xaa can be any naturally occurring amino acid
  misc_feature (167)..(167): Xaa can be any naturally occurring amino acid
  misc_feature (174)..(174): Xaa can be any naturally occurring amino acid
  misc_feature (192)..(192): Xaa can be any naturally occurring amino acid
  misc_feature (194)..(195): Xaa can be any naturally occurring amino acid
  misc_feature (199)..(199): Xaa can be any naturally occurring amino acid
  misc_feature (202)..(203): Xaa can be any naturally occurring amino acid
  misc_feature (206)..(206): Xaa can be any naturally occurring amino acid
  misc_feature (217)..(219): Xaa can be any naturally occurring amino acid
  misc_feature (228)..(228): Xaa can be any naturally occurring amino acid
  misc_feature (233)..(233): Xaa can be any naturally occurring amino acid
  MISC_FEATURE (236)..(236): Xaa = I or L
  misc_feature (243)..(243): Xaa can be any naturally occurring amino acid
  misc_feature (245)..(245): Xaa can be any naturally occurring amino acid
  misc_feature (262)..(262): Xaa can be any naturally occurring amino acid
  MISC_FEATURE (267)..(267): Xaa = I or L
  misc_feature (277)..(278): Xaa can be any naturally occurring amino acid
  misc_feature (282)..(282): Xaa can be any naturally occurring amino acid
  misc_feature (287)..(287): Xaa can be any naturally occurring amino acid
  misc_feature (307)..(307): Xaa can be any naturally occurring amino acid
  misc_feature (314)..(314): Xaa can be any naturally occurring amino acid
  misc_feature (320)..(321): Xaa can be any naturally occurring amino acid
  misc_feature (333)..(333): Xaa can be any naturally occurring amino acid
  misc_feature (343)..(343): Xaa can be any naturally occurring amino acid
  misc_feature (357)..(357): Xaa can be any naturally occurring amino acid
  misc_feature (367)..(367): Xaa can be any naturally occurring amino acid
  misc_feature (371)..(371): Xaa can be any naturally occurring amino acid
  misc_feature (374)..(375): Xaa can be any naturally occurring amino acid
  misc_feature (378)..(378): Xaa can be any naturally occurring amino acid
  misc_feature (392)..(392): Xaa can be any naturally occurring amino acid
  misc_feature (402)..(402): Xaa can be any naturally occurring amino acid
  misc_feature (414)..(415): Xaa can be any naturally occurring amino acid
  MISC_FEATURE (418)..(418): Xaa = I or L
  misc_feature (446)..(446): Xaa can be any naturally occurring amino acid
  misc_feature (448)..(449): Xaa can be any naturally occurring amino acid
  misc_feature (451)..(451): Xaa can be any naturally occurring amino acid
  misc_feature (467)..(467): Xaa can be any naturally occurring amino acid
  misc_feature (489)..(489): Xaa can be any naturally occurring amino acid
  misc_feature (500)..(500): Xaa can be any naturally occurring amino acid
  misc_feature (510)..(510): Xaa can be any naturally occurring amino acid
  misc_feature (514)..(514): Xaa can be any naturally occurring amino acid
  misc_feature (528)..(529): Xaa can be any naturally occurring amino acid
  misc_feature (532)..(532): Xaa can be any naturally occurring amino acid
  misc_feature (539)..(539): Xaa can be any naturally occurring amino acid
  misc_feature (547)..(548): Xaa can be any naturally occurring amino acid
  misc_feature (551)..(551): Xaa can be any naturally occurring amino acid
  misc_feature (553)..(554): Xaa can be any naturally occurring amino acid
  misc_feature (565)..(565): Xaa can be any naturally occurring amino acid
  misc_feature (576)..(576): Xaa can be any naturally occurring amino acid
  misc_feature (587)..(588): Xaa can be any naturally occurring amino acid
  misc_feature (600)..(600): Xaa can be any naturally occurring amino acid
  misc_feature (604)..(605): Xaa can be any naturally occurring amino acid
  misc_feature (622)..(622): Xaa can be any naturally occurring amino acid
  misc_feature (627)..(627): Xaa can be any naturally occurring amino acid
  misc_feature (629)..(629): Xaa can be any naturally occurring amino acid
  misc_feature (655)..(655): Xaa can be any naturally occurring amino acid
  misc_feature (662)..(662): Xaa can be any naturally occurring amino acid
  misc_feature (682)..(682): Xaa can be any naturally occurring amino acid
  misc_feature (686)..(686): Xaa can be any naturally occurring amino acid
  MISC_FEATURE (688)..(688): Xaa = I or L
  misc_feature (691)..(691): Xaa can be any naturally occurring amino acid
  misc_feature (698)..(698): Xaa can be any naturally occurring amino acid
  misc_feature (706)..(706): Xaa can be any naturally occurring amino acid
  misc_feature (723)..(723): Xaa can be any naturally occurring amino acid
  MISC_FEATURE (737)..(737): Xaa = I or L
  misc_feature (738)..(738): Xaa can be any naturally occurring amino acid
  misc_feature (760)..(761): Xaa can be any naturally occurring amino acid
  misc_feature (771)..(771): Xaa can be any naturally occurring amino acid
  misc_feature (773)..(773): Xaa can be any naturally occurring amino acid
  misc_feature (779)..(779): Xaa can be any naturally occurring amino acid
  misc_feature (786)..(786): Xaa can be any naturally occurring amino acid
  misc_feature (790)..(790): Xaa can be any naturally occurring amino acid
  misc_feature (798)..(798): Xaa can be any naturally occurring amino acid
  misc_feature (800)..(800): Xaa can be any naturally occurring amino acid
  misc_feature (834)..(834): Xaa can be any naturally occurring amino acid
  misc_feature (843)..(843): Xaa can be any naturally occurring amino acid
  misc_feature (851)..(852): Xaa can be any naturally occurring amino acid
  misc_feature (866)..(866): Xaa can be any naturally occurring amino acid
  misc_feature (870)..(870): Xaa can be any naturally occurring amino acid
  misc_feature (873)..(873): Xaa can be any naturally occurring amino acid
  misc_feature (877)..(877): Xaa can be any naturally occurring amino acid
  misc_feature (889)..(889): Xaa can be any naturally occurring amino acid
  misc_feature (896)..(896): Xaa can be any naturally occurring amino acid
  misc_feature (916)..(916): Xaa can be any naturally occurring amino acid
  misc_feature (923)..(923): Xaa can be any naturally occurring amino acid
  misc_feature (936)..(936): Xaa can be any naturally occurring amino acid
  misc_feature (962)..(962): Xaa can be any naturally occurring amino acid
  misc_feature (966)..(966): Xaa can be any naturally occurring amino acid
  misc_feature (970)..(970): Xaa can be any naturally occurring amino acid
  misc_feature (985)..(985): Xaa can be any naturally occurring amino acid
  misc_feature (996)..(996): Xaa can be any naturally occurring amino acid
MKISKVXXXVXKKXXXGKLXKXVNERNRXAKRLSNXLBKYIXXIDKIXKKEXXKKFXAXEEITLKLNQXXXBXLXKAXXDLRKDNXYSXXKKILHNEDINXEEXELLINDXLEKLXKIESXKYSYQKXXXNYXMSVQEHSKKSIXRIXESAKRNKEALDKFLKEYAXLDPRMEXLAKLRKLLELYFYFKNDXIXXEEEXNVXXHKXLKENHPDFVEXXXNKENAELNXYAIEXKKXLKYYFPXKXAKNSNDKIFEKQELKKXWIHQXENAVERILLXXGKVXYKLQXGYLAELWKIRINEIFIKYIXVGKAVAXFALRNXXKBENDILGGKIXKKLNGITSFXYEKIKAEEILQREXAVEVAFAANXLYAXDLXXIRXSILQFFGGASNWDXFLFFHFATSXISDKKWNAELIXXKKXGLVIREKLYSNNVAMFYSKDDLEKLLNXLXXFXLRASQVPSFKKVYVRXBFPQNLLKKFNDEKDDEAYSAXYYLLKEIYYNXFLPYFSANNXFFFXVKNLVLKANKDKFXXAFXDIREMNXGSPIEYLXXTQXNXXNEGRKKEEKEXDFIKFLLQIFXKGFDDYLKNNXXFILKFIPEPTEXIEIXXELQAWYIVGKFLNARKXNLLGXFXSYLKLLDDIELRALRNENIKYQSSNXEKEVLEXCLELIGLLSLDLNDYFBDEXDFAXYXGKXLDFEKKXMKDLAELXPYDQNDGENPIVNRNIXLAKKYGTLNLLEKXXDKVSEKEIKEYYELKKEIEEYXXKGEELHEEWXQXKNRVEXRDILEYXEELXGQIINYNXLXNKVLLYFQLGLHYLLLDILGRLVGYTGIWERDAXLYQIAAMYXNGLPEYIXXKKNDKYKDGQIVGXKINXFKXDKKXLYNAGLELFENXNEHKNIXIRNYIAHFNYLSKAESSLLXYSENLRXLFSYDRKLKNAVXKSLINILLRHGMVLKFKFGTDKKSVXIRSXKKIXHLKSIAKKLYYPEVXVSKEYCKLVKXLLKYK

SEQ ID NO: 178 - protein, 1224 aa, Bergeyella zoohelcum
MENKTSLGNNIYYNPFKPQDKSYFAGYFNAAMENTDSVFRELGKRLKGKEYTSENFFDAIFKENISLVEYERYVKLLSDYFPMARLLDKKEVPIKERKENFKKNFKGIIKAVRDLRNFYTHKEHGEVEITDEIFGVLDEMLKSTVLTVKKKKVKTDKTKEILKKSIEKQLDILCQKKLEYLRDTARKIEEKRRNQRERGEKELVAPFKYSDKRDDLIAAIYNDAFDVYIDKKKDSLKESSKAKYNTKSDPQQEEGDLKIPISKNGVVFLLSLFLTKQEIHAFKSKIAGFKATVIDEATVSEATVSHGKNSICFMATHEIFSHLAYKKLKRKVRTAEINYGEAENAEQLSVYAKETLMMQMLDELSKVPDVVYQNLSEDVQKTFIEDWNEYLKENNGDVGTMEEEQVIHPVIRKRYEDKFNYFAIRFLDEFAQFPTLRFQVHLGNYLHDSRPKENLISDRRIKEKITVFGRLSELEHKKALFIKNTETNEDREHYWEIFPNPNYDFPKENISVNDKDFPIAGSILDREKQPVAGKIGIKVKLLNQQYVSEVDKAVKAHQLKQRKASKPSIQNIIEEIVPINESNPKEAIVFGGQPTAYLSMNDIHSILYEFFDKWEKKKEKLEKKGEKELRKEIGKELEKKIVGKIQAQIQQIIDKDTNAKILKPYQDGNSTAIDKEKLIKDLKQEQNILQKLKDEQTVREKEYNDFIAYQDKNREINKVRDRNHKQYLKDNLKRKYPEAPARKEVLYYREKGKVAVWLANDIKRFMPTDFKNEWKGEQHSLLQKSLAYYEQCKEELKNLLPEKVFQHLPFKLGGYFQQKYLYQFYTCYLDKRLEYISGLVQQAENFKSENKVFKKVENECFKFLKKQNYTHKELDARVQSILGYPIFLERGFMDEKPTIIKGKTFKGNEALFADWFRYYKEYQNFQTFYDTENYPLVELEKKQADRKRKTKIYQQKKNDVFTLLMAKHIFKSVFKQDSIDQFSLEDLYQSREERLGNQERARQTGERNTNYIWNKTVDLKLCDGKITVENVKLKNVGDFIKYEYDQRVQAFLKYEENIEWQAFLIKESKEEENYPYVVEREIEQYEKVRREELLKEVHLIEEYILEKVKDKEILKKGDNQNFKYYILNGLLKQLKNEDVESYKVFNLNTEPEDVNINQLKQEATDLEQKAFVLTYIRNKFAHNQLPKKEFWDYCQEKYGKIEKEKTYAEYFAEVFKKEKEALIK

SEQ ID NO: 179 - protein, 1126 aa, Prevotella intermedia
MEDDKKTTDSIRYELKDKHFWAAFLNLARHNVYITVNHINKILEEGEINRDGYETTLKNTWNEIKDINKKDRLSKLIIKHFPFLEAATYRLNPTDTTKQKEEKQAEAQSLESLRKSFFVFIYKLRDLRNHYSHYKHSKSLERPKFEEGLLEKMYNIFNASIRLVKEDYQYNKDINPDEDFKHLDRTEEEFNYYFTKDNEGNITESGLLFFVSLFLEKKDAIWMQQKLRGFKDNRENKKKMTNEVFCRSRMLLPKLRLQSTQTQDWILLDMLNELIRCPKSLYERLREEDREKFRVPIEIADEDYDAEQEPFKNTLVRHQDRFPYFALRYFDYNEIFTNLRFQIDLGTYHFSIYKKQIGDYKESHHLTHKLYGFERIQEFTKQNRPDEWRKFVKTFNSFETSKEPYIPETTPHYHLENQKIGIRFRNDNDKIWPSLKTNSEKNEKSKYKLDKSFQAEAFLSVHELLPMMFYYLLLKTENTDNDNEIETKKKENKNDKQEKHKIEEIIENKITEIYALYDTFANGEIKSIDELEEYCKGKDIEIGHLPKQMIAILKDEHKVMATEAERKQEEMLVDVQKSLESLDNQINEEIENVERKNSSLKSGKIASWLVNDMMRFQPVQKDNEGKPLNNSKANSTEYQLLQRTLAFFGSEHERLAPYFKQTKLIESSNPHPFLKDTEWEKCNNILSFYRSYLEAKKNFLESLKPEDWEKNQYFLKLKEPKTKPKTLVQGWKNGFNLPRGIFTEPIRKWFMKHRENITVAELKRVGLVAKVIPLFFSEEYKDSVQPFYNYHFNVGNINKPDEKNFLNCEERRELLRKKKDEFKKMTDKEKEENPSYLEFKSWNKFERELRLVRNQDIVTWLLCMELFNKKKIKELNVEKIYLKNINTNTTKKEKNTEEKNGEEKNIKEKNNILNRIMPMRLPIKVYGRENFSKNKKKKIRRNTFFTVYIEEKGTKLLKQGNFKALERDRRLGGLFSFVKTPSKAESKSNTISKLRVEYELGEYQKARIEIIKDMLALEKTLIDKYNSLDTDNFNKMLTDWLELKGEPDKASFQNDVDLLIAVRNAFSHNQYPMRNRIAFANINPFSLSSANTSEEKGLGIANQLKDKTHKTIEKIIEIEKPIETKE

SEQ ID NO: 180 - protein, 1127 aa, Prevotella buccae
MQKQDKLFVDRKKNAIFAFPKYITIMENKEKPEPIYYELTDKHFWAAFLNLARHNVYTTINHINRRLEIAELKDDGYMMGIKGSWNEQAKKLDKKVRLRDLIMKHFPFLEAAAYEMTNSKSPNNKEQREKEQSEALSLNNLKNVLFIFLEKLQVLRNYYSHYKYSEESPKPIFETSLLKNMYKVFDANVRLVKRDYMHHENIDMQRDFTHLNRKKQVGRTKNIIDSPNFHYHFADKEGNMTIAGLLFFVSLFLDKKDAIWMQKKLKGFKDGRNLREQMTNEVFCRSRISLPKLKLENVQTKDWMQLDMLNELVRCPKSLYERLREKDRESFKVPFDIFSDDYNAEEEPFKNTLVRHQDRFPYFVLRYFDLNEIFEQLRFQIDLGTYHFSIYNKRIGDEDEVRHLTHHLYGFARIQDFAPQNQPEEWRKLVKDLDHFETSQEPYISKTAPHYHLENEKIGIKFCSAHNNLFPSLQTDKTCNGRSKFNLGTQFTAEAFLSVHELLPMMFYYLLLTKDYSRKESADKVEGIIRKEISNIYAIYDAFANNEINSIADLTRRLQNTNILQGHLPKQMISILKGRQKDMGKEAERKIGEMIDDTQRRLDLLCKQTNQKIRIGKRNAGLLKSGKIADWLVNDMMRFQPVQKDQNNIPINNSKANSTEYRMLQRALALFGSENFRLKAYFNQMNLVGNDNPHPFLAETQWEHQTNILSFYRNYLEARKKYLKGLKPQNWKQYQHFLILKVQKTNRNTLVTGWKNSFNLPRGIFTQPIREWFEKHNNSKRIYDQILSFDRVGFVAKAIPLYFAEEYKDNVQPFYDYPFNIGNRLKPKKRQFLDKKERVELWQKNKELFKNYPSEKKKTDLAYLDFLSWKKFERELRLIKNQDIVTWLMFKELFNMATVEGLKIGEIHLRDIDTNTANEESNNILNRIMPMKLPVKTYETDNKGNILKERPLATFYIEETETKVLKQGNFKALVKDRRLNGLFSFAETTDLNLEEHPISKLSVDLELIKYQTTRISIFEMTLGLEKKLIDKYSTLPTDSFRNMLERWLQCKANRPELKNYVNSLIAVRNAFSHNQYPMYDATLFAEVKKFTLFPSVDTKKIELNIAPQLLEIVGKAIKEIEKSENKN

SEQ ID NO: 181 - protein, 1135 aa, Porphyromonas gingivalis
MNTVPASENKGQSRTVEDDPQYFGLYLNLARENLIEVESHVRIKFGKKKLNEESLKQSLLCDHLLSVDRWTKVYGHSRRYLPFLHYFDPDSQIEKDHDSKTGVDPDSAQRLIRELYSLLDFLRNDFSHNRLDGTTFEHLEVSPDISSFITGTYSLACGRAQSRFAVFFKPDDFVLAKNRKEQLISVADGKECLTVSGFAFFICLFLDREQASGMLSRIRGFKRTDENWARAVHETFCDLCIRHPHDRLESSNTKEALLLDMLNELNRCPRILYDMLPEEERAQFLPALDENSMNNLSENSLDEESRLLWDGSSDWAEALTKRIRHQDRFPYLMLRFIEEMDLLKGIRFRVDLGEIELDSYSKKVGRNGEYDRTITDHALAFGKLSDFQNEEEVSRMISGEASYPVRFSLFAPRYAIYDNKIGYCHTSDPVYPKSKTGEKRALSNPQSMGFISVHDLRKLLLMELLCEGSFSRMQSDFLRKANRILDETAEGKLQFSALFPEMRHRFIPPQNPKSKDRREKAETTLEKYKQEIKGRKDKLNSQLLSAFDMDQRQLPSRLLDEWMNIRPASHSVKLRTYVKQLNEDCRLRLRKFRKDGDGKARAIPLVGEMATFLSQDIVRMIISEETKKLITSAYYNEMQRSLAQYAGEENRRQFRAIVAELRLLDPSSGHPFLSATMETAHRYTEGFYKCYLEKKREWLAKIFYRPEQDENTKRRISVFFVPDGEARKLLPLLIRRRMKEQNDLQDWIRNKQAHPIDLPSHLFDSKVMELLKVKDGKKKWNEAFKDWWSTKYPDGMQPFYGLRRELNIHGKSVSYIPSDGKKFADCYTHLMEKTVRDKKRELRTAGKPVPPDLAADIKRSFHRAVNEREFMLRLVQEDDRLMLMAINKMMTDREEDILPGLKNIDSILDEENQFSLAVHAKVLEKEGEGGDNSLSLVPATIEIKSKRKDWSKYIRYRYDRRVPGLMSHFPEHKATLDEVKTLLGEYDRCRIKIFDWAFALEGAIMSDRDLKPYLHESSSREGKSGEHSTLVKMLVEKKGCLTPDESQYLILIRNKAAHNQFPCAAEMPLIYRDVSAKVGSIEGSSAKDLPEGSSLVDSLWKKYEMIIRKILPILDPENRFFGKLLNNMSQPINDL

SEQ ID NO: 182 - protein, 1115 aa, Bacteroides pyogenes
MESIKNSQKSTGKTLQKDPPYFGLYLNMALLNVRKVENHIRKWLGDVALLPEKSGFHSLLTTDNLSSAKWTRFYYKSRKFLPFLEMFDSDKKSYENRRETAECLDTIDRQKISSLLKEVYGKLQDIRNAFSHYHIDDQSVKHTALIISSEMHRFIENAYSFALQKTRARFTGVFVETDFLQAEEKGDNKKFFAIGGNEGIKLKDNALIFLICLFLDREEAFKFLSRATGFKSTKEKGFLAVRETFCALCCRQPHERLLSVNPREALLMDMLNELNRCPDILFEMLDEKDQKSFLPLLGEEEQAHILENSLNDELCEAIDDPFEMIASLSKRVRYKNRFPYLMLRYIEEKNLLPFIRFRIDLGCLELASYPKKMGEENNYERSVTDHAMAFGRLTDFHNEDAVLQQITKGITDEVRFSLYAPRYAIYNNKIGFVRTSGSDKISFPTLKKKGGEGHCVAYTLQNTKSFGFISIYDLRKILLLSFLDKDKAKNIVSGLLEQCEKHWKDLSENLFDAIRTELQKEFPVPLIRYTLPRSKGGKLVSSKLADKQEKYESEFERRKEKLTEILSEKDFDLSQIPRRMIDEWLNVLPTSREKKLKGYVETLKLDCRERLRVFEKREKGEHPLPPRIGEMATDLAKDIIRMVIDQGVKQRITSAYYSEIQRCLAQYAGDDNRRHLDSIIRELRLKDTKNGHPFLGKVLRPGLGHTEKLYQRYFEEKKEWLEATFYPAASPKRVPRFVNPPTGKQKELPLIIRNLMKERPEWRDWKQRKNSHPIDLPSQLFENEICRLLKDKIGKEPSGKLKWNEMFKLYWDKEFPNGMQRFYRCKRRVEVFDKVVEYEYSEEGGNYKKYYEALIDEVVRQKISSSKEKSKLQVEDLTLSVRRVFKRAINEKEYQLRLLCEDDRLLFMAVRDLYDWKEAQLDLDKIDNMLGEPVSVSQVIQLEGGQPDAVIKAECKLKDVSKLMRYCYDGRVKGLMPYFANHEATQEQVEMELRHYEDHRRRVFNWVFALEKSVLKNEKLRRFYEESQGGCEHRRCIDALRKASLVSEEEYEFLVHIRNKSAHNQFPDLEIGKLPPNVTSGFCECIWSKYKAIICRIIPFIDPERRFFGKLLEQK

SEQ ID NO: 183 - protein, 1322 aa, Prevotella species
MSKECKKQRQEKKRRLQKANFSISLTGKHVFGAYFNMARTNFVKTINYILPIAGVRGNYSENQINKMLHALFLIQAGRNEELTTEQKQWEKKLRLNPEQQTKFQKLLFKHFPVLGPMMADVADHKAYLNKKKSTVQTEDETFAMLKGVSLADCLDIICLMADTLTECRNFYTHKDPYNKPSQLADQYLHQEMIAKKLDKVVVASRRILKDREGLSVNEVEFLTGIDHLHQEVLKDEFGNAKVKDGKVMKTFVEYDDFYFKISGKRLVNGYTVTTKDDKPVNVNTMLPALSDFGLLYFCVLFLSKPYAKLFIDEVRLFEYSPFDDKENMIMSEMLSIYRIRTPRLHKIDSHDSKATLAMDIFGELRRCPMELYNLLDKNAGQPFFHDEVKHPNSHTPDVSKRLRYDDRFPTLALRYIDETELFKRIRFQLQLGSFRYKFYDKENCIDGRVRVRRIQKEINGYGRMQEVADKRMDKWGDLIQKREERSVKLEHEELYINLDQFLEDTADSTPYVTDRRPAYNIHANRIGLYWEDSQNPKQYKVFDENGMYIPELVVTEDKKAPIKMPAPRCALSVYDLPAMLFYEYLREQQDNEFPSAEQVIIEYEDDYRKFFKAVAEGKLKPFKRPKEFRDFLKKEYPKLRMADIPKKLQLFLCSHGLCYNNKPETVYERLDRLTLQHLEERELHIQNRLEHYQKDRDMIGNKDNQYGKKSFSDVRHGALARYLAQSMMEWQPTKLKDKEKGHDKLTGLNYNVLTAYLATYGHPQVPEEGFTPRTLEQVLINAHLIGGSNPHPFINKVLALGNRNIEELYLHYLEEELKHIRSRIQSLSSNPSDKALSALPFIHHDRMRYHERTSEEMMALAARYTTIQLPDGLFTPYILEILQKHYTENSDLQNALSQDVPVKLNPTCNAAYLITLFYQTVLKDNAQPFYLSDKTYTRNKDGEKAESFSFKRAYELFSVLNNNKKDTFPFEMIPLFLTSDEIQERLSAKLLDGDGNPVPEVGEKGKPATDSQGNTIWKRRIYSEVDDYAEKLTDRDMKISFKGEWEKLPRWKQDKIIKRRDETRRQMRDELLQRMPRYIRDIKDNERTLRRYKTQDMVLFLLAEKMFTNIISEQSSEFNWKQMRLSKVCNEAFLRQTLTFRVPVTVGETTIYVEQENMSLKNYGEFYRFLTDDRLMSLLNNIVETLKPNENGDLVIRHTDLMSELAAYDQYRSTIFMLIQSIENLIITNNAVLDDPDADGFWVREDLPKRNNFASLLELINQLNNVELTDDERKLLVAIRNAFSHNSYNIDFSLIKDVKHLPEVAKGILQHLQSMLGVEITK

SEQ ID NO: 184 - protein, 1322 aa, Prevotella species; identical to SEQ ID NO: 183

SEQ ID NO: 185 - protein, 1095 aa, Riemerella anatipestifer
MEKPLLPNVYTLKHKFFWGAFLNIARHNAFITICHINEQLGLKTPSNDDKIVDVVCETWNNILNNDHDLLKKSQLTELILKHFPFLTAMCYHPPKKEGKKKGHQKEQQKEKESEAQSQAEALNPSKLIEALEILVNQLHSLRNYYSHYKHKKPDAEKDIFKHLYKAFDASLRMVKEDYKAHFTVNLTRDFAHLNRKGKNKQDNPDFNRYRFEKDGFFTESGLLFFTNLFLDKRDAYWMLKKVSGFKASHKQREKMTTEVFCRSRILLPKLRLESRYDHNQMLLDMLSELSRCPKLLYEKLSEENKKHFQVEADGFLDEIEEEQNPFKDTLIRHQDRFPYFALRYLDLNESFKSIRFQVDLGTYHYCIYDKKIGDEQEKRHLTRTLLSFGRLQDFTEINRPQEWKALTKDLDYKETSNQPFISKTTPHYHITDNKIGFRLGTSKELYPSLEIKDGANRIAKYPYNSGFVAHAFISVHELLPLMFYQHLTGKSEDLLKETVRHIQRIYKDFEEERINTIEDLEKANQGRLPLGAFPKQMLGLLQNKQPDLSEKAKIKIEKLIAETKLLSHRLNTKLKSSPKLGKRREKLIKTGVLADWLVKDFMRFQPVAYDAQNQPIKSSKANSTEFWFIRRALALYGGEKNRLEGYFKQTNLIGNTNPHPFLNKFNWKACRNLVDFYQQYLEQREKFLEAIKNQPWEPYQYCLLLKIPKENRKNLVKGWEQGGISLPRGLFTEAIRETLSEDLMLSKPIRKEIKKHGRVGFISRAITLYFKEKYQDKHQSFYNLSYKLEAKAPLLKREEHYEYWQQNKPQSPTESQRLELHTSDRWKDYLLYKRWQHLEKKLRLYRNQDVMLWLMTLELTKNHFKELNLNYHQLKLENLAVNVQEADAKLNPLNQTLPMVLPVKVYPATAFGEVQYHKTPIRTVYIREEHTKALKMGNFKALVKDRRLNGLFSFIKEENDTQKHPISQLRLRRELEIYQSLRVDAFKETLSLEEKLLNKHTSLSSLENEFRALLEEWKKEYAASSMVTDEHIAFIASVRNAFCHNQYPFYKEALHAPIPLFTVAQPTTEEKDGLGIAEALLKVLREYCEIVKSQI

SEQ ID NO: 186 - protein, 1124 aa, Prevotella aurantiaca
MEDDKKTTGSISYELKDKHFWAAFLNLARHNVYITINHINKLLEIREIDNDEKVLDIKTLWQKGNKDLNQKARLRELMTKHFPFLETAIYTKNKEDKKEVKQEKQAEAQSLESLKDCLFLFLDKLQEARNYYSHYKYSEFSKEPEFEEGLLEKMYNIFGNNIQLVINDYQHNKDINPDEDFKHLDRKGQFKYSFADNEGNITESGLLFFVSLFLEKKDAIWMQQKLNGFKDNLENKKKMTHEVFCRSRILMPKLRLESTQTQDWILLDMLNELIRCPKSLYERLQGDDREKFKVPFDPADEDYNAEQEPFKNTLIRHQDRFPYFVLRYFDYNEIFKNLRFQIDLGTYHFSIYKKLIGGQKEDRHLTHKLYGFERIQEFAKQNRPDEWKAIVKDLDTYETSNKRYISETTPHYHLENQKIGIRFRNGNKEIWPSLKTNDENNEKSKYKLDKQYQAEAFLSVHELLPMMFYYLLLKKEKPNNDEINASIVEGFIKREIRNIFKLYDAFANGEINNIDDLEKYCADKGIPKRHLPKQMVAILYDEHKDMVKEAKRKQKEMVKDTKKLLATLEKQTQKEKEDDGRNVKLLKSGEIARWLVNDMMRFQPVQKDNEGKPLNNSKANSTEYQMLQRSLALYNNEEKPTRYFRQVNLIESNNPHPFLKWTKWEECNNILTFYYSYLTKKIEFLNKLKPEDWKKNQYFLKLKEPKTNRETLVQGWKNGFNLPRGIFTEPIREWFKRHQNNSKEYEKVEALDRVGLVTKVIPLFFKEEYFKDKEENFKEDTQKEINDCVQPFYNFPYNVGNIHKPKEKDFLHREERIELWDKKKDKFKGYKEKIKSKKLTEKDKEEFRSYLEFQSWNKFERELRLVRNQDIVTWLLCKELIDKLKIDELNIEELKKLRLNNIDTDTAKKEKNNILNRVMPMELPVTVYEIDDSHKIVKDKPLHTIYIKEAETKLLKQGNFKALVKDRRLNGLFSFVKTNSEAESKRNPISKLRVEYELGEYQEARIEIIQDMLALEEKLINKYKDLPTNKFSEMLNSWLEGKDEADKARFQNDVDFLIAVRNAFSHNQYPMHNKIEFANIKPFSLYTANNSEEKGLGIANQLKDKTKETTDKIKKIEKPIETKE

SEQ ID NO: 187 - protein, 1151 aa, Prevotella saccharolytica
MEDKPFWAAFFNLARHNVYLTVNHINKLLDLEKLYDEGKHKEIFEREDIFNISDDVMNDANSNGKKRKLDIKKIWDDLDTDLTRKYQLRELILKHFPFIQPAIIGAQTKERTTIDKDKRSTSTSNDSLKQTGEGDINDLLSLSNVKSMFFRLLQILEQLRNYYSHVKHSKSATMPNFDEDLLNWMRYIFIDSVNKVKEDYSSNSVIDPNTSFSHLIYKDEQGKIKPCRYPFTSKDGSINAFGLLFFVSLFLEKQDSIWMQKKIPGFKKASENYMKMTNEVFCRNHILLPKIRLETVYDKDWMLLDMLNEVVRCPLSLYKRLTPAAQNKFKVPEKSSDNANRQEDDNPFSRILVRHQNRFPYFVLRFFDLNEVFTTLRFQINLGCYHFAICKKQIGDKKEVHHLIRTLYGFSRLQNFTQNTRPEEWNTLVKTTEPSSGNDGKTVQGVPLPYISYTIPHYQIENEKIGIKIFDGDTAVDTDIWPSVSTEKQLNKPDKYTLTPGFKADVFLSVHELLPMMFYYQLLLCEGMLKTDAGNAVEKVLIDTRNAIFNLYDAFVQEKINTITDLENYLQDKPILIGHLPKQMIDLLKGHQRDMLKAVEQKKAMLIKDTERRLKLLDKQLKQETDVAAKNTGTLLKNGQIADWLVNDMMRFQPVKRDKEGNPINCSKANSTEYQMLQRAFAFYATDSCRLSRYFTQLHLIHSDNSHLFLSRFEYDKQPNLIAFYAAYLKAKLEFLNELQPQNWASDNYFLLLRAPKNDRQKLAEGWKNGFNLPRGLFTEKIKTWFNEHKTIVDISDCDIFKNRVGQVARLIPVFFDKKFKDHSQPFYRYDFNVGNVSKPTEANYLSKGKREELFKSYQNKFKNNIPAEKTKEYREYKNFSLWKKFERELRLIKNQDILIWLMCKNLFDEKIKPKKDILEPRIAVSYIKLDSLQTNTSTAGSLNALAKVVPMTLAIHIDSPKPKGKAGNNEKENKEFTVYIKEEGTKLLKWGNFKTLLADRRIKGLFSYIEHDDIDLKQHPLTKRRVDLELDLYQTCRIDIFQQTLGLEAQLLDKYSDLNTDNFYQMLIGWRKKEGIPRNIKEDTDFLKDVRNAFSHNQYPDSKKIAFRRIRKFNPKELILEEEEGLGIATQMYKEVEKVVNRIKRIELFD

SEQ ID NO: 188 - protein, 1120 aa, Prevotella intermedia
MEDDKKTTDSIRYELKDKHFWAAFLNLARHNVYITVNHINKILEEDEINRDGYENTLENSWNEIKDINKKDRLSKLIIKHFPFLEATTYRQNPTDTTKQKEEKQAEAQSLESLKKSFFVFIYKLRDLRNHYSHYKHSKSLERPKFEEDLQNKMYNIFDVSIQFVKEDYKHNTDINPKKDFKHLDRKRKGKFHYSFADNEGNITESGLLFFVSLFLEKKDAIWVQKKLEGFKCSNKSYQKMTNEVFCRSRMLLPKLRLESTQTQDWILLDMLNELIRCPKSLYERLQGVNRKKFYVSFDPADEDYDAEQEPFKNTLVRHQDRFPYFALRYFDYNEVFANLRFQIDLGTYHFSIYKKLIGGQKEDRHLTHKLYGFERIQEFDKQNRPDEWKAIVKDSDTFKKKEEKEEEKPYISETTPHYHLENKKIGIAFKNHNIWPSTQTELTNNKRKKYNLGTSIKAEAFLSVHELLPMMFYYLLLKTENTKNDNKVGGKKETKKQGKHKIEAIIESKIKDIYALYDAFANGEINSEDELKEYLKGKDIKIVHLPKQMIAILKNEHKDMAEKAEAKQEKMKLATENRLKTLDKQLKGKIQNGKRYNSAPKSGEIASWLVNDMMRFQPVQKDENGESLNNSKANSTEYQLLQRTLAFFGSEHERLAPYFKQTKLIESSNPHPFLNDTEWEKCSNILSFYRSYLKARKNFLESLKPEDWEKNQYFLMLKEPKTNRETLVQGWKNGFNLPRGFFTEPIRKWFMEHWKSIKVDDLKRVGLVAKVTPLFFSEKYKDSVQPFYNYPFNVGDVNKPKEEDFLHREERIELWDKKKDKFKGYKAKKKFKEMTDKEKEEHRSYLEFQSWNKFERELRLVRNQDIVTWLLCTELIDKLKIDELNIKELKKLRLKDINTDTAKKEKNNILNRVMPMELPVTVYKVNKGGYIIKNKPLHTIYIKEAETKLLKQGNFKALVKDRRLNGLFSFVKTPSEAESESNPISKLRVEYELGKYQNARLDIIEDMLALEKKLIDKYNSLDTDNFHNMLTGWLELKGEAKKARFQNDVKLLTAVRNAFSHNQYPMYDENLFGNIERFSLSSSNIIESKGLDIAAKLKEEVSKAAKKIQNEEDNKKEKET

SEQ ID NO: 189 - protein, 1199 aa, Capnocytophaga canimorsus
MKNIQRLGKGNEFSPFKKEDKFYFGGFLNLANNNIEDFFKEIITRFGIVITDENKKPKETFGEKILNEIFKKDISIVDYEKWVNIFADYFPFTKYLSLYLEEMQFKNRVICFRDVMKELLKTVEALRNFYTHYDHEPIKIEDRVFYFLDKVLLDVSLTVKNKYLKTDKTKEFLNQHIGEELKELCKQRKDYLVGKGKRIDKESEIINGIYNNAFKDFICKREKQDDKENHNSVEKILCNKEPQNKKQKSSATVWELCSKSSSKYTEKSFPNRENDKHCLEVPISQKGIVFLLSFFLNKGEIYALTSNIKGFKAKITKEEPVTYDKNSIRYMATHRMFSFLAYKGLKRKIRTSEINYNEDGQASSTYEKETLMLQMLDELNKVPDVVYQNLSEDVQKTFIEDWNEYLKENNGDVGTMEEEQVIHPVIRKRYEDKFNYFAIRFLDEFAQFPTLRFQVHLGNYLCDKRTKQICDTTTEREVKKKITVFGRLSELENKKAIFLNEREEIKGWEVFPNPSYDFPKENISVNYKDFPIVGSILDREKQPVSNKIGIRVKIADELQREIDKAIKEKKLRNPKNRKANQDEKQKERLVNEIVSTNSNEQGEPVVFIGQPTAYLSMNDIHSVLYEFLINKISGEALETKIVEKIETQIKQIIGKDATTKILKPYTNANSNSINREKLLRDLEQEQQILKTLLEEQQQREKDKKDKKSKRKHELYPSEKGKVAVWLANDIKRFMPKAFKEQWRGYHHSLLQKYLAYYEQSKEELKNLLPKEVFKHFPFKLKGYFQQQYLNQFYTDYLKRRLSYVNELLLNIQNFKNDKDALKATEKECFKFFRKQNYIINPINIQIQSILVYPIFLKRGFLDEKPTMIDREKFKENKDTELADWFMHYKNYKEDNYQKFYAYPLEKVEEKEKFKRNKQINKQKKNDVYTLMMVEYIIQKIFGDKFVEENPLVLKGIFQSKAERQQNNTHAATTQERNLNGILNQPKDIKIQGKITVKGVKLKDIGNFRKYEIDQRVNTFLDYEPRKEWMAYLPNDWKEKEKQGQLPPNNVIDRQISKYETVRSKILLKDVQELEKIISDEIKEEHRHDLKQGKYYNFKYYILNGLLRQLKNENVENYKVFKLNTNPEKVNITQLKQEATDLEQKAFVLTYIRNKFAHNQLPKKEFWDYCQEKYGKIEKEKTYAEYFAEVFKREKEALIK

SEQ ID NO: 190 - protein, 1175 aa, Porphyromonas gulae
MTEQSERPYNGTYYTLEDKHFWAAFLNLARHNAYITLTHIDRQLAYSKADITNDQDVLSFKALWKNFDNDLERKSRLRSLILKHFSFLEGAAYGKKLFESKSSGNKSSKNKELTKKEKEELQANALSLDNLKSILFDFLQKLKDFRNYYSHYRHSGSSELPLFDGNMLQRLYNVFDVSVQRVKIDHEHNDEVDPHYHFNHLVRKGKKDRYGHNDNPSFKHHFVDGEGMVTEAGLLFFVSLFLEKRDAIWMQKKIRGFKGGTETYQQMTNEVFCRSRISLPKLKLESLRMDDWMLLDMLNELVRCPKPLYDRLREDDRACFRVPVDILPDEDDTDGGGEDPFKNTLVRHQDRFPYFALRYFDLKKVFTSLRFHIDLGTYHFAIYKKMIGEQPEDRHLTRNLYGFGRIQDFAEEHRPEEWKRLVRDLDYFETGDKPYISQTSPHYHIEKGKIGLRFMPEGQHLWPSPEVGTTRTGRSKYAQDKRLTAEAFLSVHELMPMMFYYFLLREKYSEEVSAERVQGRIKRVIEDVYAVYDAFARDEINTRDELDACLADKGIRRGHLPRQMIAILSQEHKDMEEKIRKKLQEMMADTDHRLDMLDRQTDRKIRIGRKNAGLPKSGVIADWLVRDMMRFQPVAKDASGKPLNNSKANSTEYRMLQRALALFGGEKERLTPYFRQMNLTGGNNPHPFLHETRWESHTNILSFYRSYLRARKAFLERIGRSDRVENRPFLLLKEPKTDRQTLVAGWKGEFHLPRGIFTEAVRDCLIEMGHDEVASYKEVGFMAKAVPLYFERACEDRVQPFYDSPFNVGNSLKPKKGRFLSKEERAEEWERGKERFRDLEAWSYSAARRIEDAFAGIEYASPGNKKKIEQLLRDLSLWEAFESKLKVRADRINLAKLKKEILEAQEHPYHDFKSWQKFERELRLVKNQDIITWMMCRDLMEENKVEGLDTGTLYLKDIRPNVQEQGSLNVLNRVKPMRLPVVVYRADSRGHVHKEEAPLATVYIEERDTKLLKQGNFKSFVKDRRLNGLFSFVDTGGLAMEQYPISKLRVEYELAKYQTARVCVFELTLRLEESLLTRYPHLPDESFREMLESWSDPLLAKWPELHGKVRLLIAVRNAFSHNQYPMYDEAVFSSIRKYDPSSPDAIEERMGLNIAHRLSEEVKQAKETVERIIQA

SEQ ID NO: 191 - protein, 1090 aa, Prevotella species
MNIPALVENQKKYFGTYSVMAMLNAQTVLDHIQKVADIEGEQNENNENLWFHPVMSHLYNAKNGYDKQPEKTMFIIERLQSYFPFLKIMAENQREYSNGKYKQNRVEVNSNDIFEVLKRAFGVLKMYRDLTNHYKTYEEKLNDGCEFLTSTEQPLSGMINNYYTVALRNMNERYGYKTEDLAFIQDKRFKFVKDAYGKKKSQVNTGFFLSLQDYNGDTQKKLHLSGVGIALLICLFLDKQYINIFLSRLPIFSSYNAQSEERRIIIRSFGINSIKLPKDRIHSEKSNKSVAMDMLNEVKRCPDELFTTLSAEKQSRFRIISDDHNEVLMKRSSDRFVPLLLQYIDYGKLFDHIRFHVNMGKLRYLLKADKTCIDGQTRVRVIEQPLNGFGRLEEAETMRKQENGTFGNSGIRIRDFENMKRDDANPANYPYIVDTYTHYILENNKVEMFINDKEDSAPLLPVIEDDRYVVKTIPSCRMSTLEIPAMAFHMFLFGSKKTEKLIVDVHNRYKRLFQAMQKEEVTAENIASFGIAESDLPQKILDLISGNAHGKDVDAFIRLTVDDMLTDTERRIKRFKDDRKSIRSADNKMGKRGFKQISTGKLADFLAKDIVLFQPSVNDGENKITGLNYRIMQSAIAVYDSGDDYEAKQQFKLMFEKARLIGKGTTEPHPFLYKVFARSIPANAVEFYERYLIERKFYLTGLSNEIKKGNRVDVPFIRRDQNKWKTPAMKTLGRIYSEDLPVELPRQMFDNEIKSHLKSLPQMEGIDFNNANVTYLIAEYMKRVLDDDFQTFYQWNRNYRYMDMLKGEYDRKGSLQHCFTSVEEREGLWKERASRTERYRKQASNKIRSNRQMRNASSEEIETILDKRLSNSRNEYQKSEKVIRRYRVQDALLFLLAKKTLTELADFDGERFKLKEIMPDAEKGILSEIMPMSFTFEKGGKKYTITSEGMKLKNYGDFFVLASDKRIGNLLELVGSDIVSKEDIMEEFNKYDQCRPEISSIVFNLEKWAFDTYPELSARVDREEKVDFKSILKILLNNKNINKEQSDILRKIRNAFDHNNYPDKGVVEIKALPEIAMSIKKAFGEYAIMK

SEQ ID NO: 192 - protein, 1150 aa, Flavobacterium branchiophilum
MENLNKILDKENEICISKIFNTKGIAAPITEKALDNIKSKQKNDLNKEARLHYFSIGHSFKQIDTKKVFDYVLIEELKDEKPLKFITLQKDFFTKEFSIKLQKLINSIRNINNHYVHNFNDINLNKIDSNVFHFLKESFELAIIEKYYKVNKKYPLDNEIVLFLKELFIKDENTALLNYFTNLSKDEAIEYILTFTITENKIWNINNEHNILNIEKGKYLTFEAMLFLITIFLYKNEANHLLPKLYDFKNNKSKQELFTFFSKKFTSQDIDAEEGHLIKFRDMIQYLNHYPTAWNNDLKLESENKNKIMTTKLIDSIIEFELNSNYPSFATDIQFKKEAKAFLFASNKKRNQTSFSNKSYNEEIRHNPHIKQYRDEIASALTPISFNVKEDKFKIFVKKHVLEEYFPNSIGYEKFLEYNDFTEKEKEDFGLKLYSNPKTNKLIERIDNHKLVKSHGRNQDRFMDFSMRFLAENNYFGKDAFFKCYKFYDTQEQDEFLQSNENNDDVKFHKGKVTTYIKYEEHLKNYSYWDCPFVEENNSMSVKISIGSEEKILKIQRNLMIYFLENALYNENVENQGYKLVNNYYRELKKDVEESIASLDLIKSNPDFKSKYKKILPKRLLHNYAPAKQDKAPENAFETLLKKADFREEQYKKLLKKAEHEKNKEDFVKRNKGKQFKLHFIRKACQMMYFKEKYNTLKEGNAAFEKKDPVIEKRKNKEHEFGHHKNLNITREEFNDYCKWMFAFNGNDSYKKYLRDLFSEKHFFDNQEYKNLFESSVNLEAFYAKTKELFKKWIETNKPTNNENRYTLENYKNLILQKQVFINVYHFSKYLIDKNLLNSENNVIQYKSLENVEYLISDFYFQSKLSIDQYKTCGKLFNKLKSNKLEDCLLYEIAYNYIDKKNVHKIDIQKILTSKIILTINDANTPYKISVPFNKLERYTEMIAIKNQNNLKARFLIDLPLYLSKNKIKKGKDSAGYEIIIKNDLEIEDINTINNKIINDSVKFTEVLMELEKYFILKDKCILSKNYIDNSEIPSLKQFSKVWIKENENEIINYRNIACHFHLPLLETFDNLLLNVEQKFIKEELQNVSTINDLSKPQEYLILLFIKFKHNNFYLNLFNKNESKTIKNDKEVKKNRVLQKFINQVILKKK

SEQ ID NO: 193 - protein, 1159 aa, Myroides odoratimimus
MKDILTTDTTEKQNRFYSHKIADKYFFGGYFNLASNNIYEVFEEVNKRNTFGKLAKRDNGNLKNYIIHVFKDELSISDFEKRVAIFASYFPILETVDKKSIKERNRTIDLTLSQRIRQFREMLISLVTAVDQLRNFYTHYHHSDIVIENKVLDFLNSSFVSTALHVKDKYLKTDKTKEFLKETIAAELDILIEAYKKKQIEKKNTRFKANKREDILNAIYNEAFWSFINDKDKDKDKETVVAKGADAYFEKNHHKSNDPDFALNISEKGIVYLLSFFLTNKEMDSLKANLTGFKGKVDRESGNSIKYMATQRIYSFHTYRGLKQKIRTSEEGVKETLLMQMIDELSKVPNVVYQHLSTTQQNSFIEDWNEYYKDYEDDVETDDLSRVTHPVIRKRYEDRFNYFAIRFLDEFFDFPTLRFQVHLGDYVHDRRTKQLGKVESDRIIKEKVTVFARLKDINSAKASYFHSLEEQDKEELDNKWTLFPNPSYDFPKEHTLQHQGEQKNAGKIGIYVKLRDTQYKEKAALEEARKSLNPKERSATKASKYDIITQIIEANDNVKSEKPLVFTGQPIAYLSMNDIHSMLFSLLTDNAELKKTPEEVEAKLIDQIGKQINEILSKDTDTKILKKYKDNDLKETDTDKITRDLARDKEEIEKLILEQKQRADDYNYTSSTKFNIDKSRKRKHLLFNAEKGKIGVWLANDIKRFMFKESKSKWKGYQHIELQKLFAYFDTSKSDLELILSNMVMVKDYPIELIDLVKKSRTLVDFLNKYLEARLEYIENVITRVKNSIGTPQFKTVRKECFTFLKKSNYTVVSLDKQVERILSMPLFIERGFMDDKPTMLEGKSYKQHKEKFADWFVHYKENSNYQNFYDTEVYEITTEDKREKAKVTKKIKQQQKNDVFTLMMVNYMLEEVLKLSSNDRLSLNELYQTKEERIVNKQVAKDTQERNKNYIWNKVVDLQLCDGLVHIDNVKLKDIGNFRKYENDSRVKEFLTYQSDIVWSAYLSNEVDSNKLYVIERQLDNYESIRSKELLKEVQEIECSVYNQVANKESLKQSGNENFKQYVLQGLLPIGMDVREMLILSTDVKFKKEEIIQLGQAGEVEQDLYSLIYIRNKFAHNQLPIKEFFDFCENNYRSISDNEYYAEYYMEIFRSIKEKYAN

SEQ ID NO: 194 - protein, 1214 aa, Flavobacterium columnare
MSSKNESYNKQKTFNHYKQEDKYFFGGFLNNADDNLRQVGKEFKTRINFNHNNNELASVFKDYFNKEKSVAKREHALNLLSNYFPVLERIQKHTNHNFEQTREIFELLLDTIKKLRDYYTHHYHKPITINPKIYDFLDDTLLDVLITIKKKKVKNDTSRELLKEKLRPELTQLKNQKREELIKKGKKLLEENLENAVFNHCLIPFLEENKTDDKQNKTVSLRKYRKSKPNEETSITLTQSGLVFLMSFFLHRKEFQVFTSGLERFKAKVNTIKEEEISLNKNNIVYMITHWSYSYYNFKGLKHRIKTDQGVSTLEQNNTTHSLTNTNTKEALLTQIVDYLSKVPNEIYETLSEKQQKEFEEDINEYMRENPENEDSTFSSIVSHKVIRKRYENKFNYFAMRFLDEYAELPTLRFMVNFGDYIKDRQKKILESIQFDSERIIKKEIHLFEKLSLVTEYKKNVYLKETSNIDLSRFPLFPNPSYVMANNNIPFYIDSRSNNLDEYLNQKKKAQSQNKKRNLTFEKYNKEQSKDAIIAMLQKEIGVKDLQQRSTIGLLSCNELPSMLYEVIVKDIKGAELENKIAQKIREQYQSIRDFTLDSPQKDNIPTTLIKTINTDSSVTFENQPIDIPRLKNALQKELTLTQEKLLNVKEHEIEVDNYNRNKNTYKFKNQPKNKVDDKKLQRKYVFYRNEIRQEANWLASDLIHFMKNKSLWKGYMHNELQSFLAFFEDKKNDCIALLETVFNLKEDCILTKGLKNLFLKHGNFIDFYKEYLKLKEDFLSTESTFLENGFIGLPPKILKKELSKRLKYIFIVFQKRQFIIKELEEKKNNLYADAINLSRGIFDEKPTMIPFKKPNPDEFASWFVASYQYNNYQSFYELTPDIVERDKKKKYKNLRAINKVKIQDYYLKLMVDTLYQDLFNQPLDKSLSDFYVSKAEREKIKADAKAYQKLNDSSLWNKVIHLSLQNNRITANPKLKDIGKYKRALQDEKIATLLTYDARTWTYALQKPEKENENDYKELHYTALNMELQEYEKVRSKELLKQVQELEKKILDKFYDFSNNASHPEDLEIEDKKGKRHPNFKLYITKALLKNESEIINLENIDIEILLKYYDYNTEELKEKIKNMDEDEKAKIINTKENYNKITNVLIKKALVLIIIRNKMAHNQYPPKFIYDLANRFVPKKEEEYFATYFNRVFETITKELWENKEKKDKTQV

SEQ ID NO: 195 - protein, 1119 aa, Porphyromonas gingivalis
MTEQNEKPYNGTYYTLEDKHFWAAFLNLARHNAYITLAHIDRQLAYSKADITNDEDILFFKGQWKNLDNDLERKARLRSLILKHFSFLEGAAYGKKLFESQSSGNKSSKKKELSKKEKEELQANALSLDNLKSILFDFLQKLKDFRNYYSHYRHPESSELPLFDGNMLQRLYNVFDVSVQRVKRDHEHNDKVDPHRHFNHLVRKGKKDKYGNNDNPFFKHHFVDREGTVTEAGLLFFVSLFLEKRDAIWMQKKIRGFKGGTEAYQQMTNEVFCRSRISLPKLKLESLRTDDWMLLDMLNELVRCPKSLYDRLREEDRARFRVPVDILSDEDDTDGTEEDPFKNTLVRHQDRFPYFALRYFDLKKVFTSLRFHIDLGTYHFAIYKKNIGEQPEDRHLTRNLYGFGRIQDFAEEHRPEEWKRLVRDLDYFETGDKPYITQTTPHYHIEKGKIGLRFVPEGQHLWPSPEVGATRTGRSKYAQDKRLTAEAFLSVHELMPMMFYYFLLREKYSEEVSAEKVQGRIKRVIEDVYAVYDAFARDEINTRDELDACLADKGIRRGHLPRQMIAILSQEHKDMEEKVRKKLQEMIADTDHRLDMLDRQTDRKIRIGRKNAGLPKSGVVADWLVRDMMRFQPVAKDTSGKPLNNSKANSTEYRMLQRALALFGGEKERLTPYFRQMNLTGGNNPHPFLHETRWESHTNILSFYRSYLEARKAFLQSIGRSDRVENHRFLLLKEPKTDRQTLVAGWKGEFHLPRGIFTEAVRDCLIEMGYDEVGSYKEVGFMAKAVPLYFERASKDRVQPFYDYPFNVGNSLKPKKGRFLSKEKRAEEWESGKERFRLAKLKKEILEAKEHPYHDFKSWQKFERELRLVKNQDIITWMMCRDLMEENKVEGLDTGTLYLKDIRTDVQEQGSLNVLNRVKPMRLPVVVYRADSRGHVHKEQAPLATVYIEERDTKLLKQGNFKSFVKDRRLNGLFSFVDTGALAMEQYPISKLRVEYELAKYQTARVCAFEQTLELEESLLTRYPHLPDKNFRKMLESWSDPLLDKWPDLHGNVRLLIAVRNAFSHNQYPMYDETLFSSIRKYDPSSPDAIEERMGLNIAHRLSEEVKQAKEMVERIIQA

SEQ ID NO: 196 - protein, 1132 aa, Prevotella intermedia
MEDDKKTKESTNMLDNKHFWAAFLNLARHNVYITVNHINKVLELKNKKDQDIIIDNDQDILAIKTHWEKVNGDLNKTERLRELMTKHFPFLETAIYTKNKEDKEEVKQEKQAKAQSFDSLKHCLFLFLEKLQEARNYYSHYKYSESTKEPMLEKELLKKMYNIFDDNIQLVIKDYQHNKDINPDEDFKHLDRTEEEFNYYFTTNKKGNITASGLLFFVSLFLEKKDAIWMQQKLRGFKDNRESKKKMTHEVFCRSRMLLPKLRLESTQTQDWILLDMLNELIRCPKSLYERLQGEYRKKFNVPFDSADEDYDAEQEPFKNTLVRHQDRFPYFALRYFDYNEIFTNLRFQIDLGTYHFSIYKKLIGGQKEDRHLTHKLYGFERIQEFAKQNRTDEWKAIVKDFDTYETSEEPYISETAPHYHLENQKIGIRFRNDNDEIWPSLKTNGENNEKRKYKLDKQYQAEAFLSVHELLPMMFYYLLLKKEEPNNDKKNASIVEGFIKREIRDIYKLYDAFANGEINNIDDLEKYCEDKGIPKRHLPKQMVAILYDEHKDMAEEAKRKQKEMVKDTKKLLATLEKQTQGEIEDGGRNIRLLKSGEIARWLVNDMMRFQPVQKDNEGNPLNNSKANSTEYQMLQRSLALYNKEEKPTRYFRQVNLINSSNPHPFLKWTKWEECNNILSFYRSYLTKKIEFLNKLKPEDWEKNQYFLKLKEPKTNRETLVQGWKNGFNLPRGIFTEPIREWFKRHQNDSEEYEKVETLDRVGLVTKVIPLFFKKEDSKDKEEYLKKDAQKEINNCVQPFYGFPYNVGNIHKPDEKDFLPSEERKKLWGDKKYKFKGYKAKVKSKKLTDKEKEEYRSYLEFQSWNKFERELRLVRNQDIVTWLLCTELIDKLKVEGLNVEELKKLRLKDIDTDTAKQEKNNILNRVMPMQLPVTVYEIDDSHNIVKDRPLHTVYIEETKTKLLKQGNFKALVKDRRLNGLFSFVDTSSETELKSNPISKSLVEYELGEYQNARIETIKDMLLLEETLIEKYKTLPTDNFSDMLNGWLEGKDEADKARFQNDVKLLVAVRNAFSHNQYPMRNRIAFANINPFSLSSADTSEEKKLDIANQLKDKTHKIIKRIIEIEKPIETKE

SEQ ID NO: 197 - protein, 1133 aa, Prevotella intermedia
MEDDKKTTDSISYELKDKHFWAAFLNLARHNVYITVNHINKVLELKNKKDQDIIIDNDQDILAIKTHWEKVNGDLNKTERLRELMTKHFPFLETAIYSKNKEDKEEVKQEKQAKAQSFDSLKHCLFLFLEKLQETRNYYSHYKYSESTKEPMLEKELLKKMYNIFDDNIQLVIKDYQHNKDINPDEDFKHLDRTEEDFNYYFTRNKKGNITESGLLFFVSLFLEKKDAIWMQQKLRGFKDNRESKKKMTHEVFCRSRMLLPKLRLESTQTQDWILLDMLNELIRCPKSLYERLQGEDREKFKVPFDPADEDYDAEQEPFKNTLVRHQDRFPYFALRYFDYNEIFTNLRFQIDLGTFHFSIYKKLIGGQKEDRHLTHKLYGFERIQEFAKQNRPDEWKAIVKDLDTYETSNERYISETTPHYHLENQKIGIRFRNDNDEIWPSLKTNGENNEKSKYKLDKQYQAEAFLSVHELLPMMFYYLLLKKEEPNNDKKNASIVEGFIKREIRDMYKLYDAFANGEINNIDDLEKYCEDKGIPKRHLPKQMVAILYDEHKDMVKEAKRKQRKMVKDTEKLLAALEKQTQEKTEDGGRNIRLLKSGEIARWLVNDMMRFQPVQKDNEGNPLNNSKANSTEYQMLQRSLALYNKEEKPTRYFRQVNLINSSNPHPFLKWTKWEECNNILSFYRSYLTKKIEFLNKLKPEDWEKNQYFLKLKEPKTNRETLVQGWKNGFNLPRGIFTEPIREWFKRHQNDSKEYEKVEALDRVGLVTKVIPLFFKKEDSKDKEEDLKKDAQKEINNCVQPFYSFPYNVGNIHKPDEKDFLHREERIELWDKKKDKFKGYKAKVKSKKLTDKEKEEYRSYLEFQSWNKFERELRLVRNQDIVTWLLCTELIDKLKVEGLNVEELKKLRLKDIDTDTAKQEKNNILNRVMPMQLPVTVYEIDDSHNIVKDRPLHTVYIEETKTKLLKQGNFKALVKDRRLNGLFSFVDTSSEAELKSNPISKSLVEYELGEYQNARIETIKDMLLLEETLIEKYKNLPTDNFSDMLNGWLEGKDEADKARFQNDVKLLVAVRNAFSHNQYPMRNRIAFANINPFSLSSADTSEEKKLDIANQLKDKTHKIIKRIIEIEKPIETKE

SEQ ID NO: 198 - protein, 953 aa, Unknown
  Cas13b orthologue of unknown origin
MSNEIGAFREHQFAYAPGNEKQEEATFATYFNLALSNVEGMMFGEVESNPDKIEKSLDTLPPAILRQIASFIWLSKEDHPDKAYSTEEVKVIVTDLVRRLCFYRNYFSHCFYLDTQYFYSDELVDTTAIGEKLPYNFHHFITNRLFRYSLPEITLFRWNEGERKYEILRDGLIFFCCLFLKRGQAERFLNELRFFKRTDEEGRIKRTIFTKYCTRESHKHIGIEEQDFLIFQDIIGDLNRVPKVCDGVVDLSKENERYIKNRETSNESDENKARYRLLIREKDKFPYYLMRYIVDFGVLPCITFKQNDYSTKEGRGQFHYQDAAVAQEERCYNFVVRNGNVYYSYMPQAQNVVRISELQGTISVEELRNMVYASINGKDVNKSVEQYLYHLHLLYEKILTISGQTIKEGRVDVEDYRPLLDKLLLRPASNGEELRRELRKLLPKRVCDLLSNRFDCSEGVSAVEKRLKAILLRHEQLLLSQNPALHIDKIKSVIDYLYLFFSDDEKFRQQPTEKAHRGLKDEEFQMYHYLVGDYDSHPLALWKELEASGRLKPEMRKLTSATSLHGLYMLCLKGTVEWCRKQLMSIGKGTAKVEAIADRVGLKLYDKLKEYTPEQLEREVKLVVMHGYAAAATPKPKAQAAIPSKLTELRFYSFLGKREMSFAAFIRQDKKAQKLWLRNFYTVENIKTLQKRQAAADAACKKLYNLVGEVERVHTNDKVLVLVAQRYRERLLNVGSKCAVTLDNPERQQKLADVYEVQNAWLSIRFDDLDFTLTHVNLSNLRKAYNLIPRKHILAFKEYLDNRVKQKLCEECRNVRRKEDLCTCCSPRYSNLTSWLKENHSESSIEREAATMMLLDVERKLLSFLLDERRKAIIEYGKFIPFSALVKECRLADAGLCGIRNDVLHDNVISYADAIGKLSAYFPKEASEAVEYIRRTKEVREQRREELMANSSQ

SEQ ID NO: 199 - protein, 1036 aa, Chryseobacterium ureilyticum
METQILGNGISYDHTKTEDKHFFGGFLNTAQNNIDLLIKAYISKFESSPRKLNSVQFPDVCFKKNDSDADFQHKLQFIRKHLPVIQYLKYGGNREVLKEKFRLLLQAVDSLRNFYTHFYHKPIQLPNELLTLLDTIFGEIGNEVRQNKMKDDKTRHLLKKNLSEELDFRYQEQLERLRKLKSEGKKVDLRDTEAIRNGVLNAAFNHLIFKDAEDFKPTVSYSSYYYDSDTAENGISISQSGLLFLLSMFLGRREMEDLKSRVRGFKARIIKHEEQHVSGLKFMATHWVFSEFCFKGIKTRLNADYHEETLLIQLIDELSKVPDELYRSFDVATRERFIEDINEYIRDGKEDKSLIESKIVHPVIRKRYESKFNYFAIRFLDEFVNFPTLRFQVHAGNYVHDRRIKSIEGTGFKTERLVKDRIKVFGKLSTISSLKAEYLAKAVNITDDTGWELLPHPSYVFIDNNIPIHLTVDPSFKNGVKEYQEKRKLQKPEEMKNRQGGDKMHKPAISSKIGKSKDINPESPVALLSMNEIPALLYEILVKKASPEEVEAKIRQKLTAVFERIRDYDPKVPLPASQVSKRLRNNTDTLSYNKEKLVELANKEVEQTERKLALITKNRRECREKVKGKFKRQKVFKNAELGTEATWLANDIKRFMPEEQKKNWKGYQHSQLQQSLAFFESRPGEARSLLQAGWDFSDGSSFWNGWVMNSFARDNTFDGFYESYLNGRMKYFLRLADNIAQQSSTNKLISNFIKQQMPKGLFDRRLYMLEDLATEKNKILSKPLIFPRGIFDDKPTFKKGVQVSEEPEAFADWYSYGYDVKHKFQEFYAWDRDYEELLREELEKDTAFTKNSIHYSRESQIELLAKKQDLKVKKVRIQDLYLKLMAEFLFENVFGHELALPLDQFYLTQEERLKQEQEAIVQSQRPKGDDSPNIVKENFIWSKTIPFKSGRVFEPNVKLKDIGKFRNLLTDEKVDILLSYNNTEIGKQVIENELIIGAGSYEFIRREQLFKEIQQMKRLSLRSVRGMGVPIRLNLK

SEQ ID NO: 200 - protein, 1090 aa, Unknown; identical to SEQ ID NO: 191
  Cas13b orthologue of unknown origin

SEQ ID NO: 201 - protein, 1095 aa, Unknown; identical to SEQ ID NO: 185
  Cas13b orthologue of unknown origin

SEQ ID NO: 202 - protein, 1115 aa, Unknown; identical to SEQ ID NO: 182
  Cas13b orthologue of unknown origin

SEQ ID NO: 203 - protein, 1115 aa, Bacteroides pyogenes
MESIKNSQKSTGKTLQKDPPYFGLYLNMALLNVRKVENHIRKWLGDVALLPEKSGFHSLLTTDNLSSAKWTRFYYKSRKFLPFLEMFDSDKKSYENRRETTECLDTIDRQKISSLLKEVYGKLQDIRNAFSHYHIDDQSVKHTALIISSEMHRFIENAYSFALQKTRARFTGVFVETDFLQAEEKGDNKKFFAIGGNEGIKLKDNALIFLICLFLDREEAFKFLSRATGFKSTKEKGFLAVRETFCALCCRQPHERLLSVNPREALLMDMLNELNRCPDILFEMLDEKDQKSFLPLLGEEEQAHILENSLNDELCEAIDDPFEMIASLSKRVRYKNRFPYLMLRYIEEKNLLPFIRFRIDLGCLELASYPKKMGEENNYERSVTDHAMAFGRLTDFHNEDAVLQQITKGITDEVRFSLYAPRYAIYNNKIGFVRTGGSDKISFPTLKKKGGEGHCVAYTLQNTKSFGFISIYDLRKILLLSFLDKDKAKNIVSGLLEQCEKHWKDLSENLFDAIRTELQKEFPVPLIRYTLPRSKGGKLVSSKLADKQEKYESEFERRKEKLTEILSEKDFDLSQIPRRMIDEWLNVLPTSREKKLKGYVETLKLDCRERLRVFEKREKGEHPVPPRIGEMATDLAKDIIRMVIDQGVKQRITSAYYSEIQRCLAQYAGDDNRRHLDSIIRELRLKDTKNGHPFLGKVLRPGLGHTEKLYQRYFEEKKEWLEATFYPAASPKRVPRFVNPPTGKQKELPLIIRNLMKERPEWRDWKQRKNSHPIDLPSQLFENEICRLLKDKIGKEPSGKLKWNEMFKLYWDKEFPNGMQRFYRCKRRVEVFDKVVEYEYSEEGGNYKKYYEALIDEVVRQKISSSKEKSKLQVEDLTLSVRRVFKRAINEKEYQLRLLCEDDRLLFMAVRDLYDWKEAQLDLDKIDNMLGEPVSVSQVIQLEGGQPDAVIKAECKLKDVSKLMRYCYDGRVKGLMPYFANHEATQEQVEMELRHYEDHRRRVFNWVFALEKSVLKNEKLRRFYEESQGGCEHRRCIDALRKASLVSEEEYEFLVHIRNKSAHNQFPDLEIGKLPPNVTSGFCECIWSKYKAIICRIIPFIDPERRFFGKLLEQK

SEQ ID NO: 204 - protein, 1119 aa, Unknown; identical to SEQ ID NO: 195
  Cas13b orthologue of unknown origin

SEQ ID NO: 205 - protein, 1120 aa, Unknown; identical to SEQ ID NO: 188
  Cas13b orthologue of unknown origin

SEQ ID NO: 206 - protein, 1124 aa, Unknown; identical to SEQ ID NO: 186
  Cas13b orthologue of unknown origin

SEQ ID NO: 207 - protein, 1125 aa, Prevotella pallens
MKEEEKGKTPVVSTYNKDDKHFWAAFLNLARHNVYITVNHINKILGEGEINRDGYENTLEKSWNEIKDINKKDRLSKLIIKHFPFLEVTTYQRNSADTTKQKEEKQAEAQSLESLKKSFFVFIYKLRDLRNHYSHYKHSKSLERPKFEEDLQEKMYNIFDASIQLVKEDYKHNTDIKTEEDFKHLDRKGQFKYSFADNEGNITESGLLFFVSLFLEKKDAIWVQKKLEGFKCSNESYQKMTNEVFCRSRMLLPKLRLQSTQTQDWILLDMLNELIRCPKSLYERLREEDRKKFRVPIEIADEDYDAEQEPFKNALVRHQDRFPYFALRYFDYNEIFTNLRFQIDLGTYHFSIYKKQIGDYKESHHLTHKLYGFERIQEFTKQNRPDEWRKFVKTFNSFETSKEPYIPETTPHYHLENQKIGIRFRNDNDKIWPSLKTNSEKNEKSKYKLDKSFQAEAFLSVHELLPMMFYYLLLKTENTDNDNEIETKKKENKNDKQEKHKIEEIIENKITEIYALYDAFANGKINSIDKLEEYCKGKDIEIGHLPKQMIAILKSEHKDMATEAKRKQEEMLADVQKSLESLDNQINEEIENVERKNSSLKSGEIASWLVNDMMRFQPVQKDNEGNPLNNSKANSTEYQMLQRSLALYNKEEKPTRYFRQVNLIESSNPHPFLNNTEWEKCNNILSFYRSYLEAKKNFLESLKPEDWEKNQYFLMLKEPKTNCETLVQGWKNGFNLPRGIFTEPIRKWFMEHRKNITVAELKRVGLVAKVIPLFFSEEYKDSVQPFYNYLFNVGNINKPDEKNFLNCEERRELLRKKKDEFKKMTDKEKEENPSYLEFQSWNKFERELRLVRNQDIVTWLLCMELFNKKKIKELNVEKIYLKNINTNTTKKEKNTEEKNGEEKIIKEKNNILNRIMPMRLPIKVYGRENFSKNKKKKIRRNTFFTVYIEEKGTKLLKQGNFKALERDRRLGGLFSFVKTHSKAESKSNTISKSRVEYELGEYQKARIEIIKDMLALEETLIDKYNSLDTDNFHNMLTGWLKLKDEPDKASFQNDVDLLIAVRNAFSHNQYPMRNRIAFANINPFSLSSANTSEEKGLGIANQLKDKTHKTIEKIIEIEKPIETKE

SEQ ID NO: 208 - protein, 1125 aa, Prevotella intermedia
MKMEDDKKTTESTNMLDNKHFWAAFLNLARHNVYITVNHINKVLELKNKKDQDIIIDNDQDILAIKTHWEKVNGDLNKTERLRELMTKHFPFLETAIYTKNKEDKEEVKQEKQAEAQSLESLKDCLFLFLEKLQEARNYYSHYKYSESTKEPMLEEGLLEKMYNIFDDNIQLVIKDYQHNKDINPDEDFKHLDRKGQFKYSFADNEGNITESGLLFFVSLFLEKKDAIWMQQKLTGFKDNRESKKKMTHEVFCRRRMLLPKLRLESTQTQDWILLDMLNELIRCPKSLYERLQGEYRKKFNVPFDSADEDYDAEQEPFKNTLVRHQDRFPYFALRYFDYNEIFTNLRFQIDLGTYHFSIYKKLIGGQKEDRHLTHKLYGFERIQEFAKQNRPDEWKALVKDLDTYETSNERYISETTPHYHLENQKIGIRFRNGNKEIWPSLKTNGENNEKSKYKLDKPYQAEAFLSVHELLPMMFYYLLLKKEEPNNDKKNASIVEGFIKREIRDMYKLYDAFANGEINNIGDLEKYCEDKGIPKRHLPKQMVAILYDEPKDMVKEAKRKQKEMVKDTKKLLATLEKQTQEEIEDGGRNIRLLKSGEIARWLVNDMMRFQPVQKDNEGNPLNNSKANSTEYQMLQRSLALYNKEEKPTRYFRQVNLINSSNPHPFLKWTKWEECNNILSFYRNYLTKKIEFLNKLKPEDWEKNQYFLKLKEPKTNRETLVQGWKNGFNLPRGIFTEPIREWFKRHQNDSKEYEKVEALKRVGLVTKVIPLFFKEEYFKEDAQKEINNCVQPFYSFPYNVGNIHKPDEKDFLPSEERKKLWGDKKDKFKGYKAKVKSKKLTDKEKEEYRSYLEFQSWNKFERELRLVRNQDIVTWLLCTELIDKMKVEGLNVEELQKLRLKDIDTDTAKQEKNNILNRIMPMQLPVTVYEIDDSHNIVKDRPLHTVYIEETKTKLLKQGNFKALVKDRRLNGLFSFVDTSSKAELKDKPISKSVVEYELGEYQNARIETIKDMLLLEKTLIKKYEKLPTDNFSDMLNGWLEGKDESDKARFQNDVKLLVAVRNAFSHNQYPMRNRIAFANINPFSLSSADISEEKKLDIANQLKDKTHKIIKKIIEIEKPIETKE

SEQ ID NO: 209 - protein, 1126 aa, Unknown; identical to SEQ ID NO: 179
  Cas13b orthologue of unknown origin

SEQ ID NO: 210 - protein, 1127 aa, Unknown; identical to SEQ ID NO: 180
  Cas13b orthologue of unknown origin

SEQ ID NO: 211 - protein, 1127 aa, Prevotella buccae; identical to SEQ ID NO: 180

SEQ ID NO: 212 - protein, 1132 aa, Unknown; identical to SEQ ID NO: 196
  Cas13b orthologue of unknown origin

SEQ ID NO: 213 - protein, 1133 aa, Prevotella intermedia; identical to SEQ ID NO: 197

SEQ ID NO: 214 - protein, 1134 aa, Prevotella intermedia
MKMEDDKKTKESTNMLDNKHFWAAFLNLARHNVYITVNHINKVLELKNKKDQDIIIDNDQDILAIKTHWEKVNGDLNKTERLRELMTKHFPFLETAIYTKNKEDKEEVKQEKQAKAQSFDSLKHCLFLFLEKLQEARNYYSHYKYSESTKEPMLEKELLKKMYNIFDDNIQLVIKDYQHNKDINPDEDFKHLDRTEEEFNYYFTTNKKGNITASGLLFFVSLFLEKKDAIWMQQKLRGFKDNRESKKKMTHEVFCRSRMLLPKLRLESTQTQDWILLDMLNELIRCPKSLYERLQGEYRKKFNVPFDSADEDYDAEQEPFKNTLVRHQDRFPYFALRYFDYNEIFTNLRFQIDLGTYHFSIYKKLIGGQKEDRHLTHKLYGFERIQEFAKQNRTDEWKAIVKDFDTYETSEEPYISETAPHYHLENQKIGIRFRNDNDEIWPSLKTNGENNEKRKYKLDKQYQAEAFLSVHELLPMMFYYLLLKKEEPNNDKKNASIVEGFIKREIRDIYKLYDAFANGEINNIDDLEKYCEDKGIPKRHLPKQMVAILYDEHKDMAEEAKRKQKEMVKDTKKLLATLEKQTQGEIEDGGRNIRLLKSGEIARWLVNDMMRFQPVQKDNEGNPLNNSKANSTEYQMLQRSLALYNKEEKPTRYFRQVNLINSSNPHPFLKWTKWEECNNILSFYRSYLTKKIEFLNKLKPEDWEKNQYFLKLKEPKTNRETLVQGWKNGFNLPRGIFTEPIREWFKRHQNDSEEYEKVETLDRVGLVTKVIPLFFKKEDSKDKEEYLKKDAQKEINNCVQPFYGFPYNVGNIHKPDEKDFLPSEERKKLWGDKKYKFKGYKAKVKSKKLTDKEKEEYRSYLEFQSWNKFERELRLVRNQDIVTWLLCTELIDKLKVEGLNVEELKKLRLKDIDTDTAKQEKNNILNRVMPMQLPVTVYEIDDSHNIVKDRPLHTVYIEETKTKLLKQGNFKALVKDRRLNGLFSFVDTSSETELKSNPISKSLVEYELGEYQNARIETIKDMLLLEETLIEKYKTLPTDNFSDMLNGWLEGKDEADKARFQNDVKLLVAVRNAFSHNQYPMRNRIAFANINPFSLSSADTSEEKKLDIANQLKDKTHKIIKRIIEIEKPIETKE

SEQ ID NO: 215 - protein, 1135 aa, Unknown; identical to SEQ ID NO: 181
  Cas13b orthologue of unknown origin

SEQ ID NO: 216 - protein, 1135 aa, Porphyromonas gingivalis
MNTVPASENKGQSRTVEDDPQYFGLYLNLARENLIEVESHVRIKFGKKKLNEESLKQSLLCDHLLSVDRWTKVYGHSRRYLPFLHYFDPDSQIEKDHDSKTGVDPDSAQRLIRELYSLLDFLRNDFSHNRLDGTTFEHLEVSPDISSFITGTYSLACGRAQSRFADFFKPDDFVLAKNRKEQLISVADGKECLTVSGLAFFICLFLDREQASGMLSRIRGFKRTDENWARAVHETFCDLCIRHPHDRLESSNTKEALLLDMLNELNRCPRILYDMLPEEERAQFLPALDENSMNNLSENSLNEESRLLWDGSSDWAEALTKRIRHQDRFPYLMLRFIEEMDLLKGIRFRVDLGEIELDSYSKKVGRNGEYDRTITDHALAFGKLSDFQNEEEVSRMISGEASYPVRFSLFAPRYAIYDNKIGYCHTSDPVYPKSKTGEKRALSNPRSMGFISVHDLRKLLLMELLCEGSFSRMQSDFLRKANRILDETAEGKLQFSALFPEMRHRFIPPQNPKSKDRREKAETTLEKYKQEIKGRKDKLNSQLLSAFDMDQRQLPSRLLDEWMNIRPASHSVKLRTYVKQLNEDCRLRLQKFRKDGDGKARAIPLVGEMATFLSQDIVRMIISEETKKLITSAYYNEMQRSLAQYAGEENRHQFRAIVAELRLLDPSSGHPFLSATMETAHRYTEDFYKCYLEKKREWLAKTFYRPEQDENTKRRISVFFVPDGEARKLLPLLIRRRMKEQNDLQDWIRNKQAHPIDLPSHLFDSKIMELLKVKDGKKKWNEAFKDWWSTKYPDGMQPFYGLRRELNIHGKSVSYIPSDGKKFADCYTHLMEKTVQDKKRELRTAGKPVPPDLAADIKRSFHRAVNEREFMLRLVQEDDRLMLMAINKMMTDREEDILPGLKNIDSILDEENQFSLAVHAKVLEKEGEGGDNSLSLVPATIEIKSKRKDWSKYIRYRYDRRVPGLMSHFPEHKATLDEVKTLLGEYDRCRIKIFDWAFALEGAIMSDRDLKPYLHESSSREGKSGEHSTLVKMLVEKKGCLTPDESQYLILIRNKAAHNQFPCAAEMPLIYRDVSAKVGSIEGSSAKDLPEGSSLVDSLWKKYEMIIRKILPILDPENRFFGKLLNNMSQPINDL

SEQ ID NO: 217 - protein, 1135 aa, Porphyromonas gingivalis
MNTVPASENKGQSRTVEDDPQYFGLYLNLARENLIEVESHVRIKFGKKKLNEESLKQSLLCDHLLSVDRWTKVYGHSRRYLPFLHYFDPDSQIEKDHDSKTGVDPDSAQRLIRELYSLLDFLRNDFSHNRLDGTTFEHLEVSPDISSFITGTYSLACGRAQSRFADFFKPDDFVLAKNRKEQLISVADGKECLTVSGLAFFICLFLDREQASGMLSRIRGFKRTDENWARAVHETFCDLCIRHPHDRLESSNTKEALLLDMLNELNRCPRILYDMLPEEERAQFLPALDENSMNNLSENSLNEESRLLWDGSSDWAEALTKRIRHQDRFPYLMLRFIEEMDLLKGIRFRVDLGEIELDSYSKKVGRNGEYDRTITDHALAFGKLSDFQNEEEVSRMISGEASYPVRFSLFAPRYAIYDNKIGYCHTSDPVYPKSKTGEKRALSNPQSMGFISVHDLRKLLLMELLCEGSFSRMQSGFLRKANRILDETAEGKLQFSALFPEMRHRFIPPQNPKSKDRREKAETTLEKYKQEIKGRKDKLNSQLLSAFDMNQRQLPSRLLDEWMNIRPASHSVKLRTYVKQLNEDCRLRLRKFRKDGDGKARAIPLVGEMATFLSQDIVRMIISEETKKLITSAYYNEMQRSLAQYAGEENRRQFRAIVAELHLLDPSSGHPFLSATMETAHRYTEDFYKCYLEKKREWLAKTFYRPEQDENTKRRISVFFVPDGEARKLLPLLIRRRMKEQNDLQDWIRNKQAHPIDLPSHLFDSKIMELLKVKDGKKKWNEAFKDWWSTKYPDGMQPFYGLRRELNIHGKSVSYIPSDGKKFADCYTHLMEKTVQDKKRELRTAGKPVPPDLAADIKRSFHRAVNEREFMLRLVQEDDRLMLMAINKMMTDREEDILPGLKNIDSILDEENQFSLAVHAKVLEKEGEGGDNSLSLVPATIEIKSKRKDWSKYIRYRYDRRVPGLMSHFPEHKATLDEVKTLLGEYDRCRIKIFDWAFALEGAIMSDRDLKPYLHESSSREGKSGEHSTLVKMLVEKKGCLTPDESQYLILIRNKAAHNQFPCAAEMPLIYRDVSAKVGSIEGSSAKDLPEGSSLVDSLWKKYEMIIRKILPILDHENRFFGKLLNNMSQPINDL

SEQ ID NO: 218 - protein, 1135 aa, Porphyromonas gingivalis
MNTVPASENKGQSRTVEDDPQYFGLYLNLARENLIEVESHVRIKFGKKKLNEESLKQSLLCDHLLSVDRWTKVYGHSRRYLPFLHYFDPDSQIEKDHDSKTGVDPDSAQRLIRELYSLLDFLRNDFSHNRLDGTTFEHLEVSPDISSFITGTYSLACGRAQSRFADFFKPDDFVLAKNRKEQLISVADGKECLTVSGLAFFICLFLDREQASGMLSRIRGFKRTDENWARAVHETFCDLCIRHPHDRLESSNTKEALLLDMLNELNRCPRILYDMLPEEERAQFLPALDENSMNNLSENSLNEESRLLWDGSSDWAEALTKRIRHQDRFPYLMLRFIEEMDLLKGIRFRVDLGEIELDSYSKKVGRNGEYDRTITDHALAFGKLSDFQNEEEVSRMISGEASYPVRFSLFAPRYAIYDNKIGYCHTSDPVYPKSKTGEKRALSNPRSMGFISVHDLRKLLLMELLCEGSFSRMQSDFLRKANRILDETAEGKLQFSALFPEMRHRFIPPQNPKSKDRREKAETTLEKYKQEIKGRKDKLNSQLLSAFDMDQRQLPSRLLDEWMNIRPASHSVKLRTYVKQLNEDCRLRLQKFRKDGDGKARAIPLVGEMATFLSQDIVRMIISEETKKLITSAYYNEMQRSLAQYAGEENRHQFRAIVAELRLLDPSSGHPFLSATMETAHRYTEDFYKCYLEKKREWLAKTFYRPEQDENTKRRISVFFVPDGEARKLLPLLIRRRMKEQNDLQDWIRNKQAHPIDLPSHLFDSKVMELLKVKDGKKKWNEAFKDWWSTKYPDGMQPFYGLRRELNIHGKSVSYIPSDGKKFADCYTHLMEKTVRDKKRELRTAGKPVPPDLAAYIKRSFHRAVNEREFMLRLVQEDDRLMLMAINKIMTDREEDILPGLKNIDSILDKENQFSLAVHAKVLEKEGEGGDNSLSLVPATIEIKSKRKDWSKYIRYRYDRRVPGLMSHFPEHKATLDEVKTLLGEYDRCRIKIFDWAFALEGAIMSDRDLKPYLHESSSREGKSGEHSTLVKMLVEKKGCLTPDESQYLILIRNKAAHNQFPCAAEIPLIYRDVSAKVGSIEGSSAKDLPEGSSLVDSLWKKYEMIIRKILPILDPENRFFGKLLNNMSQPINDL

SEQ ID NO: 219 - protein, 1150 aa, Unknown; identical to SEQ ID NO: 192
  Cas13b orthologue of unknown origin

SEQ ID NO: 220 - protein, 1150 aa, Prevotella saccharolytica
MMEKENVQGSHIYYEPTDKCFWAAFYNLARHNAYLTIAHINSFVNSKKGINNDDKVLDIIDDWSKFDNDLLMGARLNKLILKHFPFLKAPLYQLAKRKTRKQQGKEQQDYEKKGDEDPEVIQEAIANAFKMANVRKTLHAFLKQLEDLRNHFSHYNYNSPAKKMEVKFDDGFCNKLYYVFDAALQMVKDDNRMNPEINMQTDFEHLVRLGRNRKIPNTFKYNFTNSDGTINNNGLLFFVSLFLEKRDAIWMQKKIKGFKGGTENYMRMTNEVFCRNRMVIPKLRLETDYDNHQLMFDMLNELVRCPLSLYKRLKQEDQDKFRVPIEFLDEDNEADNPYQENANSDENPTEETDPLKNTLVRHQHRFPYFVLRYFDLNEVFKQLRFQINLGCYHFSIYDKTIGERTEKRHLTRTLFGFDRLQNFSVKLQPEHWKNMVKHLDTEESSDKPYLSDAMPHYQIENEKIGIHFLKTDTEKKETVWPSLEVEEVSSNRNKYKSEKNLTADAFLSTHELLPMMFYYQLLSSEEKTRAAAGDKVQGVLQSYRKKIFDIYDDFANGTINSMQKLDERLAKDNLLRGNMPQQMLAILEHQEPDMEQKAKEKLDRLITETKKRIGKLEDQFKQKVRIGKRRADLPKVGSIADWLVNDMMRFQPAKRNADNTGVPDSKANSTEYRLLQEALAFYSAYKDRLEPYFRQVNLIGGTNPHPFLHRVDWKKCNHLLSFYHDYLEAKEQYLSHLSPADWQKHQHFLLLKVRKDIQNEKKDWKKSLVAGWKNGFNLPRGLFTESIKTWFSTDADKVQITDTKLFENRVGLIAKLIPLYYDKVYNDKPQPFYQYPFNINDRYKPEDTRKRFTAASSKLWNEKKMLYKNAQPDSSDKIEYPQYLDFLSWKKLERELRMLRNQDMMVWLMCKDLFAQCTVEGVEFADLKLSQLEVDVNVQDNLNVLNNVSSMILPLSVYPSDAQGNVLRNSKPLHTVYVQENNTKLLKQGNFKSLLKDRRLNGLFSFIAAEGEDLQQHPLTKNRLEYELSIYQTMRISVFEQTLQLEKAILTRNKTLCGNNFNNLLNSWSEHRTDKKTLQPDIDFLIAVRNAFSHNQYPMSTNTVMQGIEKFNIQTPKLEEKDGLGIASQLAKKTKDAASRLQNIINGGTN

SEQ ID NO: 221 - protein, 1151 aa, Unknown; identical to SEQ ID NO: 187
  Cas13b orthologue of unknown origin

SEQ ID NO: 222 - protein, 1156 aa, Chryseobacterium carnipullorum
MNTRVTGMGVSYDHTKKEDKHFFGGFLNLAQDNITAVIKAFCIKFDKNPMSSVQFAESCFTDKDSDTDFQNKVRYVRTHLPVIGYLNYGGDRNTFRQKLSTLLKAVDSLRNFYTHYYHSPLALSTELFELLDTVFASVAVEVKQHKMKDDKTRQLLSKSLAEELDIRYKQQLERLKELKEQGKNIDLRDEAGIRNGVLNAAFNHLIYKEGEIAKPTLSYSSFYYGADSAENGITISQSGLLFLLSMFLGKKEIEDLKSRIRGFKAKIVRDGEENISGLKFMATHWIFSYLSFKGMKQRLSTDFHEETLLIQIIDELSKVPDEVYHDFDTATREKFVEDINEYIREGNEDFSLGDSTIIHPVIRKRYENKFNYFAVRFLDEFIKFPSLRFQVHLGNFVHDRRIKDIHGTGFQTERVVKDRIKVFGKLSEISSLKTEYIEKELDLDSDTGWEIFPNPSYVFIDNNIPIYISTNKTFKNGSSEFIKLRRKEKPEEMKMRGEDKKEKRDIASMIGNAGSLNSKTPLAMLSLNEMPALLYEILVKKTTPEEIELIIKEKLDSHFENIKNYDPEKPLPASQISKRLRNNTTDKGKKVINPEKLIHLINKEIDATEAKFALLAKNRKELKEKFRGKPLRQTIFSNMELGREATWLADDIKRFMPDILRKNWKGYQHNQLQQSLAFFNSRPKEAFTILQDGWDFADGSSFWNGWIINSFVKNRSFEYFYEAYFEGRKEYFSSLAENIKQHTSNHRNLRRFIDQQMPKGLFENRHYLLENLETEKNKILSKPLVFPRGLFDTKPTFIKGIKVDEQPELFAEWYQYGYSTEHVFQNFYGWERDYNDLLESELEKDNDFSKNSIHYSRTSQLELIKLKQDLKIKKIKIQDLFLKLIAGHIFENIFKYPASFSLDELYLTQEERLNKEQEALIQSQRKEGDHSDNIIKDNFIGSKTVTYESKQISEPNVKLKDIGKFNRFLLDDKVKTLLSYNEDKVWNKNDLDLELSIGENSYEVIRREKLFKKIQNFELQTLTDWPWNGTDHPEEFGTTDNKGVNHPNFKMYVVNGILRKHTDWFKEGEDNWLENLNETHFKNLSFQELETKSKSIQTAFLIIMIRNQFAHNQLPAVQFFEFIQKKYPEIQGSTTSELYLNFINLAVVELLELLEK

SEQ ID NO: 223 - protein, 1157 aa, Myroides odoratimimus
MKDILTTDTTEKQNRFYSHKIADKYFFGGYFNLASNNIYEVFEEVNKRNTFGKLAKRDNGNLKNYIIHVFKDELSISDFEKRVAIFASYFPILETVDKKSIKERNRTIDLTLSQRIRQFREMLISLVTAVDQLRNFYTHYHHSEIVIENKVLDFLNSSLVSTALHVKDKYLKTDKTKEFLKETIAAELDILIEAYKKKQIEKKNTRFKANKREDILNAIYNEAFWSFINDKDKDKETVVAKGADAYFEKNHHKSNDPDFALNISEKGIVYLLSFFLTNKEMDSLKANLTGFKGKVDRESGNSIKYMATQRIYSFHTYRGLKQKIRTSEEGVKETLLMQMIDELSKVPNVVYQHLSTTQQNSFIEDWNEYYKDYEDDVETDDLSRVIHPVIRKRYEDRFNYFAIRFLDEFFDFPTLRFQVHLGDYVHDRRTKQLGKVESDRIIKEKVTVFARLKDINSAKANYFHSLEEQDKEELDNKWTLFPNPSYDFPKEHTLQHQGEQKNAGKIGIYVKLRDTQYKEKAALEEARKSLNPKERSATKASKYDIITQIIEANDNVKSEKPLVFTGQPIAYLSMNDIHSMLFSLLTDNAELKKTPEEVEAKLIDQIGKQINEILSKDTDTKILKKYKDNDLKETDTDKITRDLARDKEEIEKLILEQKQRADDYNYTSSTKFNIDKSRKRKHLLFNAEKGKIGVWLANDIKRFMTEEFKSKWKGYQHTELQKLFAYYDTSKSDLDLILSDMVMVKDYPIELIALVKKSRTLVDFLNKYLEARLGYMENVITRVKNSIGTPQFKTVRKECFTFLKKSNYTVVSLDKQVERILSMPLFIERGFMDDKPTMLEGKSYQQHKEKFADWFVHYKENSNYQNFYDTEVYEITTEDKREKAKVTKKIKQQQKNDVFTLMMVNYMLEEVLKLSSNDRLSLNELYQTKEERIVNKQVAKDTQERNKNYIWNKVVDLQLCEGLVRIDKVKLKDIGNFRKYENDSRVKEFLTYQSDIVWSAYLSNEVDSNKLYVIERQLDNYESIRSKELLKEVQEIECSVYNQVANKESLKQSGNENFKQYVLQGLVPIGMDVREMLILSTDVKFIKEEIIQLGQAGEVEQDLYSLIYIRNKFAHNQLPIKEFFDFCENNYRSISDNEYYAEYYMEIFRSIKEKYTS

SEQ ID NO: 224 - protein, 1157 aa, Myroides odoratimimus
MKDILTTDTTEKQNRFYSHKIADKYFFGGYFNLASNNIYEVFEEVNKRNTFGKLAKRDNGNLKNYIIHVFKDELSISDFEKRVAIFASYFPILETVDKKSIKERNRTIDLTLSQRIRQFREMLISLVTAVDQLRNFYTHYHHSEIVIENKVLDFLNSSLVSTALHVKDKYLKTDKTKEFLKETIAAELDILIEAYKKKQIEKKNTRFKANKREDILNAIYNEAFWSFINDKDKDKETVVAKGADAYFEKNHHKSNDPDFALNISEKGIVYLLSFFLTNKEMDSLKANLTGFKGKVDRESGNSIKYMATQRIYSFHTYRGLKQKIRTSEEGVKETLLMQMIDELSKVPNVVYQHLSTTQQNSFIEDWNEYYKDYEDDVETDDLSRVIHPVIRKRYEDRFNYFAIRFLDEFFDFPTLRFQVHLGDYVHDRRTKQLGKVESDRIIKEKVTVFARLKDINSAKASYFHSLEEQDKEELDNKWTLFPNPSYDFPKEHTLQHQGEQKNAGKIGIYVKLRDTQYKEKAALEEARKSLNPKERSATKASKYDIITQIIEANDNVKSEKPLVFTGQPIAYLSMNDIHSMLFSLLTDNAELKKTPEEVEAKLIDQIGKQINEILSKDTDTKILKKYKDNDLKETDTDKITRDLARDKEEIEKLILEQKQRADDYNYTSSTKFNIDKSRKRKHLLFNAEKGKIGVWLANDIKRFMFKESKSKWKGYQHTELQKLFAYFDTSKSDLELILSDMVMVKDYPIELIDLVRKSRTLVDFLNKYLEARLGYIENVITRVKNSIGTPQFKTVRKECFAFLKESNYTVASLDKQIERILSMPLFIERGFMDSKPTMLEGKSYQQHKEDFADWFVHYKENSNYQNFYDTEVYEIITEDKREQAKVTKKIKQQQKNDVFTLMMVNYMLEEVLKLPSNDRLSLNELYQTKEERIVNKQVAKDTQERNKNYIWNKVVDLQLCEGLVRIDKVKLKDIGNFRKYENDSRVKEFLTYQSDIVWSGYLSNEVDSNKLYVIERQLDNYESIRSKELLKEVQEIECIVYNQVANKESLKQSGNENFKQYVLQGLLPRGTDVREMLILSTDVKFKKEEIMQLGQVREVEQDLYSLIYIRNKFAHNQLPIKEFFDFCENNYRPISDNEYYAEYYMEIFRSIKEKYAS

SEQ ID NO: 225 - protein, 1159 aa, Unknown
  Cas13b orthologue of unknown origin
MKDILTTDTTEKQNRFYSHKIADKYFFGGYFNLASNNIYEVFEEVNKRNTFGKLAKRDNGNLKNYIIHVFKDELSISDFEKRVAIFASYFPILETVDKKSIKERNRTIDLTLSQRIRQFREMLISLVTAVDQLRNFYTHYHHSDIVIENKVLDFLNSSFVSTALHVKDKYLKTDKTKEFLKETIAAELDILIEAYKKKQIEKKNTRFKANKREDILNAIYNEAFWSFINDKDKDKDKETVVAKGADAYFEKNHHKSNDPDFALNISEKGIVYLLSFFLTNKEMDSLKANLTGFKGKVDRESGNSIKYMATQRIYSFHTYRGLKQKIRTSEEGVKETLLMQMIDELSKVPNVVYQHLSTTQQNSFIEDWNEYYKDYEDDVETDDLSRVIHPVIRKRYEDRFNYFAIRFLDEFFDFPTLRFQVHLGDYVHDRRTKQLGKVESDRIIKEKVTVFARLKDINSAKASYFHSLEEQDKEELDNKWTLFPNPSYDFPKEHTLQHQGEQKNAGKIGIYVKLRDTQYKEKAALEEARKSLNPKERSATKASKYDIITQIIEANDNVKSEKPLVFTGQPIAYLSMNDIHSMLFSLLTDNAELKKTPEEVEAKLIDQIGKQINEILSKDTDTKILKKYKDNDLKETDTDKITRDLARDKEEIEKLILEQKQRADDYNYTSSTKFNIDKSRKRKHLLFNAEKGKIGVWLANDIKRFMFKESKSKWKGYQHTELQKLFAYFDTSKSDLELILSNMVMVKDYPIELIDLVKKSRTLVDFLNKYLEARLEYIENVITRVKNSIGTPQFKTVRKECFTFLKKSNYTVVSLDKQVERILSMPLFIERGFMDDKPTMLEGKSYKQHKEKFADWFVHYKENSNYQNFYDTEVYEITTEDKREKAKVTKKIKQQQKNDVFTLMMVNYMLEEVLKLSSNDRLSLNELYQTKEERIVNKQVAKDTQERNKNYIWNKVVDLQLCDGLVHIDNVKLKDIGNFRKYENDSRVKEFLTYQSDIVWSAYLSNEVDSNKLYVIERQLDNYESIRSKELLKEVQEIECSVYNQVANKESLKQSGNENFKQYVLQGLLPIGMDVREMLILSTDVKFKKEEIIQLGQAGEVEQDLYSLIYIRNKFAHNQLPIKEFFDFCENNYRSISDNEYYAEYYMEIFRSIKEKYAN

SEQ ID NO: 226 - protein, 1159 aa, Unknown; identical to SEQ ID NO: 193
  Cas13b orthologue of unknown origin

SEQ ID NO: 227 - protein, 1161 aa, Bacteroidetes bacterium
MENQTQKGKGIYYYYTKNEDKHYFGSFLNLANNNIEQIIEEFRIRLSLKDEKNIKEIINNYFTDKKSYTDWERGINILKEYLPVIDYLDLAITDKEFEKIDLKQKETAKRKYFRTNFSLLIDTIIDLRNFYTHYFHKPISINPDVAKFLDKNLLNVCLDIKKQKMKTDKTKQALKDGLDKELKKLIELKKAELKEKKIKTWNITENVEGAVYNDAFNHMVYKNNAGVTILKDYHKSILPDDKIDSELKLNFSISGLVFLLSMFLSKKEIEQFKSNLEGFKGKVIGENGEYEISKFNNSLKYMATHWIFSYLTFKGLKQRVKNTFDKETLLMQMIDELNKVPHEVYQTLSKEQQNEFLEDINEYVQDNEENKKSMENSIVVHPVIRKRYDDKFNYFAIRFLDEFANFPTLKFFVTAGNFVHDKREKQIQGSMLTSDRMIKEKINVFGKLTEIAKYKSDYFSNENTLETSEWELFPNPSYLLIQNNIPVHIDLIHNTEEAKQCQIAIDRIKCTTNPAKKRNTRKSKEEIIKIIYQKNKNIKYGDPTALLSSNELPALIYELLVNKKSGKELENIIVEKIVNQYKTIAGFEKGQNLSNSLITKKLKKSEPNEDKINAEKIILAINRELEITENKLNIIKNNRAEFRTGAKRKHIFYSKELGQEATWIAYDLKRFMPEASRKEWKGFHHSELQKFLAFYDRNKNDAKALLNMFWNFDNDQLIGNDLNSAFREFHFDKFYEKYLIKRDEILEGFKSFISNFKDEPKLLKKGIKDIYRVFDKRYYIIKSTNAQKEQLLSKPICLPRGIFDNKPTYIEGVKVESNSALFADWYQYTYSDKHEFQSFYDMPRDYKEQFEKFELNNIKSIQNKKNLNKSDKFIYFRYKQDLKIKQIKSQDLFIKLMVDELFNVVFKNNIELNLKKLYQTSDERFKNQLIADVQKNREKGDTSDNKMNENFIWNMTIPLSLCNGQIEEPKVKLKDIGKFRKLETDDKVIQLLEYDKSKVWKKLEIEDELENMPNSYERIRREKLLKGIQEFEHFLLEKEKFDGINHPKHFEQDLNPNFKTYVINGVLRKNSKLNYTEIDKLLDLEHISIKDIETSAKEIHLAYFLIHVRNKFGHNQLPKLEAFELMKKYYKKNNEETYAEYFHKVSSQIVNEFKNSLEKHS

SEQ ID NO: 228 - protein, 1165 aa, Chryseobacterium jejuense
MEKTQTGLGIYYDHTKLQDKYFFGGFFNLAQNNIDNVIKAFIIKFFPERKDKDINIAQFLDICFKDNDADSDFQKKNKFLRIHFPVIGFLTSDNDKAGFKKKFALLLKTISELRNFYTHYYHKSIEFPSELFELLDDIFVKTTSEIKKLKKKDDKTQQLLNKNLSEEYDIRYQQQIERLKELKAQGKRVSLTDETAIRNGVFNAAFNHLIYRDGENVKPSRLYQSSYSEPDPAENGISLSQNSILFLLSMFLERKETEDLKSRVKGFKAKIIKQGEEQISGLKFMATHWVFSYLCFKGIKQKLSTEFHEETLLIQIIDELSKVPDEVYSAFDSKTKEKFLEDINEYMKEGNADLSLEDSKVIHPVIRKRYENKFNYFAIRFLDEYLSSTSLKFQVHVGNYVHDRRVKHINGTGFQTERIVKDRIKVFGRLSNISNLKADYIKEQLELPNDSNGWEIFPNPSYIFIDNNVPIHVLADEATKKGIELFKDKRRKEQPEELQKRKGKISKYNIVSMIYKEAKGKDKLRIDEPLALLSLNEIPALLYQILEKGATPKDIELIIKNKLTERFEKIKNYDPETPAPASQISKRLRNNTTAKGQEALNAEKLSLLIEREIENTETKLSSIEEKRLKAKKEQRRNTPQRSIFSNSDLGRIAAWLADDIKRFMPAEQRKNWKGYQHSQLQQSLAYFEKRPQEAFLLLKEGWDTSDGSSYWNNWVMNSFLENNHFEKFYKNYLMKRVKYFSELAGNIKQHTHNTKFLRKFIKQQMPADLFPKRHYILKDLETEKNKVLSKPLVFSRGLFDNNPTFIKGVKVTENPELFAEWYSYGYKTEHVFQHFYGWERDYNELLDSELQKGNSFAKNSIYYNRESQLDLIKLKQDLKIKKIKIQDLFLKRIAEKLFENVFNYPTTLSLDEFYLTQEERAEKERIALAQSLREEGDNSPNIIKDDFIWSKTIAFRSKQIYEPAIKLKDIGKFNRFVLDDEESKASKLLSYDKNKIWNKEQLERELSIGENSYEVIRREKLFKEIQNLELQILSNWSWDGINHPREFEMEDQKNTRHPNFKMYLVNGILRKNINLYKEDEDFWLESLKENDFKTLPSEVLETKSEMVQLLFLVILIRNQFAHNQLPEIQFYNFIRKNYPEIQNNTVAELYLNLIKLAVQKLKDNS

SEQ ID NO: 229 - protein, 1175 aa, Unknown; identical to SEQ ID NO: 190
  Cas13b orthologue of unknown origin

SEQ ID NO: 230 - protein, 1175 aa, Unknown
  Cas13b orthologue of unknown origin
MTEQSERPYNGTYYTLEDKHFWAAFLNLARHNAYITLTHIDRQLAYSKADITNDQDVLSFKALWKNFDNDLERKSRLRSLILKHFSFLEGAAYGKKLFESKSSGNKSSKNKELTKKEKEELQANALSLDNLKSILFDFLQKLKDFRNYYSHYRHSESSELPLFDGNMLQRLYNVFDVSVQRVKRDHEHNDKVDPHRHFNHLVRKGKKDRYGHNDNPSFKHHFVDSEGMVTEAGLLFFVSLFLEKRDAIWMQKKIRGFKGGTETYQQMTNEVFCRSRISLPKLKLESLRTDDWMLLDMLNELVRCPKPLYDRLREDDRACFRVPVDILPDEDDTDGGGEDPFKNTLVRHQDRFPYFALRYFDLKKVFTSLRFHIDLGTYHFAIYKKMIGEQPEDRHLTRNLYGFGRIQDFAEEHRPEEWKRLVRDLDYFETGDKPYISQTTPHYHIEKGKIGLRFVPEGQHLWPSPEVGTTRTGRSKYAQDKRLTAEAFLSVHELMPMMFYYFLLREKYSEEVSAEKVQGRIKRVIEDVYAIYDAFARDEINTLKELDACLADKGIRRGHLPKQMIGILSQERKDMEEKVRKKLQEMIADTDHRLDMLDRQTDRKIRIGRKNAGLPKSGVIADWLVRDMMRFQPVAKDTSGKPLNNSKANSTEYRMLQRALALFGGEKERLTPYFRQMNLTGGNNPHPFLHETRWESHTNILSFYRSYLRARKAFLERIGRSDRVENCPFLLLKEPKTDRQTLVAGWKGEFHLPRGIFTEAVRDCLIEMGYDEVGSYREVGFMAKAVPLYFERACEDRVQPFYDSPFNVGNSLKPKKGRFLSKEDRAEEWERGKERFRDLEAWSHSAARRIKDAFAGIEYASPGNKKKIEQLLRDLSLWEAFESKLKVRADKINLAKLKKEILEAQEHPYHDFKSWQKFERELRLVKNQDIITWMMCRDLMEENKVEGLDTGTLYLKDIRPNVQEQGSLNVLNRVKPMRLPVVVYRADSRGHVHKEEAPLATVYIEERDTKLLKQGNFKSFVKDRRLNGLFSFVDTGGLAMEQYPISKLRVEYELAKYQTARVCVFELTLRLEESLLSRYPHLPDESFREMLESWSDPLLAKWPELHGKVRLLIAVRNAFSHNQYPMYDEAVFSSIRKYDPSSPDAIEERMGLNIAHRLSEEVKQAKETVERIIQA

SEQ ID NO: 231 - protein, 1175 aa, Porphyromonas gingivalis
MTEQNEKPYNGTYYTLEDKHFWAAFFNLARHNAYITLTHIDRQLAYSKADITNDEDILFFKGQWKNLDNDLERKARLRSLILKHFSFLEGAAYGKKLFESQSSGNKSSKKKELTKKEKEELQANALSLDNLKSILFDFLQKLKDFRNYYSHYRHPESSELPLFDGNMLQRLYNVFDVSVQRVKRDHEHNDKVDPHRHFNHLVRKGKKDRCGNNDNPFFKHHFVDREEKVTEAGLLFFVSLFLEKRDAIWMQKKIRGFKGGTETYQQMTNEVFCRSRISLPKLKLESLRTDDWMLLDMLNELVRCPKSLYDRLREEDRARFRVPVDILSDEDDTDGTEEDPFKNTLVRHQDRFPYFALRYFDLKKVFTSLRFHIDLGTYHFAIYKKNIGEQPEDRHLTRNLYGFGRIQDFAEEHRPEEWKRLVRDLDYFETGDKPYITQTTPHYHIEKGKIGLRFVPEGQLLWPSPEVGATRTGRSKYAQDKRFTAEAFLSVHELMPMMFYYFLLREKYSEEASAERVQGRIKRVIEDVYAVYDAFARGEIDTLDRLDACLADKGIRRGHLPRQMIAILSQEHKDMEEKVRKKLQEMIADTDHRLDMLDRQTDRKIRIGRKNAGLPKSGVIADWLVRDMMRFQPVAKDTSGKPLNNSKANSTEYRMLQRALALFGGEKERLTPYFRQMNLTGGNNPHPFLHETRWESHTNILSFYRSYLKARKAFLQSIGRSDRVENHRFLLLKEPKTDRQTLVAGWKGEFHLPRGIFTEAVRDCLIEMGLDEVGSYKEVGFMAKAVPLYFERACKDRVQPFYDYPFNVGNSLKPKKGRFLSKEKRAEEWESGKERFRDLEAWSHSAARRIEDAFAGIENASRENKKKIEQLLQDLSLWETFESKLKVKADKINIAKLKKEILEAKEHPYLDFKSWQKFERELRLVKNQDIITWMMCRDLMEENKVEGLDTGTLYLKDIRTDVHEQGSLNVLNRVKPMRLPVVVYRADSRGHVHKEQAPLATVYIEERDTKLLKQGNFKSFVKDRRLNGLFSFVDTGALAMEQYPISKLRVEYELAKYQTARVCAFEQTLELEESLLTRYPHLPDKNFRKMLESWSDPLLDKWPDLHGNVRLLIAVRNAFSHNQYPMYDETLFSSIRKYDPSSPDAIEERMGLNIAHRLSEEVKQAKEMVERIIQA

SEQ ID NO: 232 - protein, 1199 aa, Unknown; identical to SEQ ID NO: 189
  Cas13b orthologue of unknown origin

SEQ ID NO: 233 - protein, 1214 aa, Unknown; identical to SEQ ID NO: 194
  Cas13b orthologue of unknown origin

SEQ ID NO: 234 - protein, 1224 aa, Unknown; identical to SEQ ID NO: 178
  Cas13b orthologue of unknown origin

SEQ ID NO: 235 - protein, 1224 aa, Bergeyella zoohelcum; identical to SEQ ID NO: 178

SEQ ID NO: 236 - protein, 1322 aa, Unknown; identical to SEQ ID NO: 183
  Cas13b orthologue of unknown origin

SEQ ID NO: 237 - protein, 1322 aa, Unknown; identical to SEQ ID NO: 183
  Cas13b orthologue of unknown origin

SEQ ID NO: 238 - protein, 1380 aa, Listeriaceae bacterium
MGNLFGHKRWYEVRDKKDFKIKRKVKVKRNYDGNKYILNINENNNKEKIDNNKFIRKYINYKKNDNILKEFTRKFHAGNILFKLKGKEGIIRIENNDDFLETEEVVLYIEAYGKSEKLKALGITKKKIIDEAIRQGITKDDKKIEIKRQENEEEIEIDIRDEYTNKTLNDCSIILRIIENDELETKKSIYEIFKNINMSLYKIIEKIIENETEKVFENRYYEEHLREKLLKDDKIDVILTNFMEIREKIKSNLEILGFVKFYLNVGGDKKKSKNKKMLVEKILNINVDLTVEDIADFVIKELEFWNITKRIEKVKKVNNEFLEKRRNRTYIKSYVLLDKHEKFKIERENKKDKIVKFFVENIKNNSIKEKIEKILAEFKIDELIKKLEKELKKGNCDTEIFGIFKKHYKVNFDSKKFSKKSDEEKELYKIIYRYLKGRIEKILVNEQKVRLKKMEKIEIEKILNESILSEKILKRVKQYTLEHIMYLGKLRHNDIDMTTVNTDDFSRLHAKEELDLELITFFASTNMELNKIFSRENINNDENIDFFGGDREKNYVLDKKILNSKIKIIRDLDFIDNKNNITNNFIRKFTKIGTNERNRILHAISKERDLQGTQDDYNKVINIIQNLKISDEEVSKALNLDVVFKDKKNIITKINDIKISEENNNDIKYLPSFSKVLPEILNLYRNNPKNEPFDTIETEKIVLNALIYVNKELYKKLILEDDLEENESKNIFLQELKKTLGNIDEIDENIIENYYKNAQISASKGNNKAIKKYQKKVIECYIGYLRKNYEELFDFSDFKMNIQEIKKQIKDINDNKTYERITVKTSDKTIVINDDFEYIISIFALLNSNAVINKIRNRFFATSVWLNTSEYQNIIDILDEIMQLNTLRNECITENWNLNLEEFIQKMKEIEKDFDDFKIQTKKEIFNNYYEDIKNNILTEFKDDINGCDVLEKKLEKIVIFDDETKFEIDKKSNILQDEQRKLSNINKKDLKKKVDQYIKDKDQEIKSKILCRIIFNSDFLKKYKKEIDNLIEDMESENENKFQEIYYPKERKNELYIYKKNLFLNIGNPNFDKIYGLISNDIKMADAKFLFNIDGKNIRKNKISEIDAILKNLNDKLNGYSKEYKEKYIKKLKENDDFFAKNIQNKNYKSFEKDYNRVSEYKKIRDLVEFNYLNKIESYLIDINWKLAIQMARFERDMHYIVNGLRELGIIKLSGYNTGISRAYPKRNGSDGFYTTTAYYKFFDEESYKKFEKICYGFGIDLSENSEINKPENESIRNYISHFYIVRNPFADYSIAEQIDRVSNLLSYSTRYNNSTYASVFEVFKKDVNLDYDELKKKFKLIGNNDILERLMKPKKVSVLELESYNSDYIKNLIIELLT

SEQ ID NO: 239 - protein, 1197 aa, Leptotrichia wadei; identical to SEQ ID NO: 148

SEQ ID NO: 240 - protein, 1080 aa, Listeria seeligeri
MWISIKTLIHHLGVLFFCDYMYNRREKKIIEVKTMRITKVEVDRKKVLISRDKNGGKLVYENEMQDNTEQIMHHKKSSFYKSVVNKTICRPEQKQMKKLVHGLLQENSQEKIKVSDVTKLNISNFLNHRFKKSLYYFPENSPDKSEEYRIEINLSQLLEDSLKKQQGTFICWESFSKDMELYINWAENYISSKTKLIKKSIRNNRIQSTESRSGQLMDRYMKDILNKNKPFDIQSVSEKYQLEKLTSALKATFKEAKKNDKEINYKLKSTLQNHERQIIEELKENSELNQFNIEIRKHLETYFPIKKTNRKVGDIRNLEIGEIQKIVNHRLKNKIVQRILQEGKLASYEIESTVNSNSLQKIKIEEAFALKFINACLFASNNLRNMVYPVCKKDILMIGEFKNSFKEIKHKKFIRQWSQFFSQEITVDDIELASWGLRGAIAPIRNEIIHLKKHSWKKFFNNPTFKVKKSKIINGKTKDVTSEFLYKETLFKDYFYSELDSVPELIINKMESSKILDYYSSDQLNQVFTIPNFELSLLTSAVPFAPSFKRVYLKGFDYQNQDEAQPDYNLKLNIYNEKAFNSEAFQAQYSLFKMVYYQVFLPQFTTNNDLFKSSVDFILTLNKERKGYAKAFQDIRKMNKDEKPSEYMSYIQSQLMLYQKKQEEKEKINHFEKFINQVFIKGFNSFIEKNRLTYICHPTKNTVPENDNIEIPFHTDMDDSNIAFWLMCKLLDAKQLSELRNEMIKFSCSLQSTEEISTFTKAREVIGLALLNGEKGCNDWKELFDDKEAWKKNMSLYVSEELLQSLPYTQEDGQTPVINRSIDLVKKYGTETILEKLFSSSDDYKVSAKDIAKLHEYDVTEKIAQQESLHKQWIEKPGLARDSAWTKKYQNVINDISNYQWAKTKVELTQVRHLHQLTIDLLSRLAGYMSIADRDFQFSSNYILERENSEYRVTSWILLSENKNKNKYNDYELYNLKNASIKVSSKNDPQLKVDLKQLRLTLEYLELFDNRLKEKRNNISHFNYLNGQLGNSILELFDDARDVLSYDRKLKNAVSKSLKEILSSHGMEVTFKPLYQTNHH

SEQ ID NO: 241 - protein, 1320 aa, Lachnospiraceae bacterium
MQISKVNHKHVAVGQKDRERITGFIYNDPVGDEKSLEDVVAKRANDTKVLFNVFNTKDLYDSQESDKSEKDKEIISKGAKFVAKSFNSAITILKKQNKIYSTLTSQQVIKELKDKFGGARIYDDDIEEALTETLKKSFRKENVRNSIKVLIENAAGIRSSLSKDEEELIQEYFVKQLVEEYTKTKLQKNVVKSIKNQNMVIQPDSDSQVLSLSESRREKQSSAVSSDTLVNCKEKDVLKAFLTDYAVLDEDERNSLLWKLRNLVNLYFYGSESIRDYSYTKEKSVWKEHDEQKANKTLFIDEICHITKIGKNGKEQKVLDYEENRSRCRKQNINYYRSALNYAKNNTSGIFENEDSNHFWIHLIENEVERLYNGIENGEEFKFETGYISEKVWKAVINHLSIKYIALGKAVYNYAMKELSSPGDIEPGKIDDSYINGITSFDYEIIKAEESLQRDISMNVVFATNYLACATVDTDKDFLLFSKEDIRSCTKKDGNLCKNIMQFWGGYSTWKNFCEEYLKDDKDALELLYSLKSMLYSMRNSSFHFSTENVDNGSWDTELIGKLFEEDCNRAARIEKEKFYNNNLHMFYSSSLLEKVLERLYSSHHERASQVPSFNRVFVRKNFPSSLSEQRITPKFTDSKDEQIWQSAVYYLCKEIYYNDFLQSKEAYKLFREGVKNLDKNDINNQKAADSFKQAVVYYGKAIGNATLSQVCQAIMTEYNRQNNDGLKKKSAYAEKQNSNKYKHYPLFLKQVLQSAFWEYLDENKEIYGFISAQIHKSNVEIKAEDFIANYSSQQYKKLVDKVKKTPELQKWYTLGRLINPRQANQFLGSIRNYVQFVKDIQRRAKENGNPIRNYYEVLESDSIIKILEMCTKLNGTTSNDIHDYFRDEDEYAEYISQFVNFGDVHSGAALNAFCNSESEGKKNGIYYDGINPIVNRNWVLCKLYGSPDLISKIISRVNENMIHDFHKQEDLIREYQIKGICSNKKEQQDLRTFQVLKNRVELRDIVEYSEIINELYGQLIKWCYLRERDLMYFQLGFHYLCLNNASSKEADYIKINVDDRNISGAILYQIAAMYINGLPVYYKKDDMYVALKSGKKASDELNSNEQTSKKINYFLKYGNNILGDKKDQLYLAGLELFENVAEHENIIIFRNEIDHFHYFYDRDRSMLDLYSEVFDRFFTYDMKLRKNVVNMLYNILLDHNIVSSFVFETGEKKVGRGDSEVIKPSAKIRLRANNGVSSDVFTYKVGSKDELKIATLPAKNEEFLLNVARLIYYPDMEAVSENMVREGVVKVEKSNDKKGKISRGSNTRSSNQSKYNNKS

SEQ ID NO: 242 - protein, 1437 aa, Lachnospiraceae bacterium; identical to SEQ ID NO: 151

SEQ ID NO: 243 - protein, 1380 aa, Clostridium aminophilum
MKFSKVDHTRSAVGIQKATDSVHGMLYTDPKKQEVNDLDKRFDQLNVKAKRLYNVFNQSKAEEDDDEKRFGKVVKKLNRELKDLLFHREVSRYNSIGNAKYNYYGIKSNPEEIVSNLGMVESLKGERDPQKVISKLLLYYLRKGLKPGTDGLRMILEASCGLRKLSGDEKELKVFLQTLDEDFEKKTFKKNLIRSIENQNMAVQPSNEGDPIIGITQGRFNSQKNEEKSAIERMMSMYADLNEDHREDVLRKLRRLNVLYFNVDTEKTEEPTLPGEVDTNPVFEVWHDHEKGKENDRQFATFAKILTEDRETRKKEKLAVKEALNDLKSAIRDHNIMAYRCSIKVTEQDKDGLFFEDQRINRFWIHHIESAVERILASINPEKLYKLRIGYLGEKVWKDLLNYLSIKYIAVGKAVFHFAMEDLGKTGQDIELGKLSNSVSGGLTSFDYEQIRADETLQRQLSVEVAFAANNLFRAVVGQTGKKIEQSKSEENEEDFLLWKAEKIAESIKKEGEGNTLKSILQFFGGASSWDLNHFCAAYGNESSALGYETKFADDLRKAIYSLRNETFHFTTLNKGSFDWNAKLIGDMFSHEAATGIAVERTRFYSNNLPMFYRESDLKRIMDHLYNTYHPRASQVPSFNSVFVRKNFRLFLSNTLNTNTSFDTEVYQKWESGVYYLFKEIYYNSFLPSGDAHHLFFEGLRRIRKEADNLPIVGKEAKKRNAVQDFGRRCDELKNLSLSAICQMIMTEYNEQNNGNRKVKSTREDKRKPDIFQHYKMLLLRTLQEAFAIYIRREEFKFIFDLPKTLYVMKPVEEFLPNWKSGMFDSLVERVKQSPDLQRWYVLCKFLNGRLLNQLSGVIRSYIQFAGDIQRRAKANHNRLYMDNTQRVEYYSNVLEVVDFCIKGTSRFSNVFSDYFRDEDAYADYLDNYLQFKDEKIAEVSSFAALKTFCNEEEVKAGIYMDGENPVMQRNIVMAKLFGPDEVLKNVVPKVTREEIEEYYQLEKQIAPYRQNGYCKSEEDQKKLLRFQRIKNRVEFQTITEFSEIINELLGQLISWSFLRERDLLYFQLGFHYLCLHNDTEKPAEYKEISREDGTVIRNAILHQVAAMYVGGLPVYTLADKKLAAFEKGEADCKLSISKDTAGAGKKIKDFFRYSKYVLIKDRMLTDQNQKYTIYLAGLELFENTDEHDNITDVRKYVDHFKYYATSDENAMSILDLYSEIHDRFFTYDMKYQKNVANMLENILLRHFVLIRPEFFTGSKKVGEGKKITCKARAQIEIAENGMRSEDFTYKLSDGKKNISTCMIAARDQKYLNTVARLLYYPHEAKKSIVDTREKKNNKKTNRGDGTFNKQKGTARKEKDNGPREFNDTGFSNTPFAGFD

SEQ ID NO: 244 - protein, 1140 aa, Carnobacterium gallinarum
MRITKVKIKLDNKLYQVTMQKEEKYGTLKLNEESRKSTAEILRLKKASFNKSFHSKTINSQKENKNATIKKNGDYISQIFEKLVGVDTNKNIRKPKMSLTDLKDLPKKDLALFIKRKFKNDDIVEIKNLDLISLFYNALQKVPGEHFTDESWADFCQEMMPYREYKNKFIERKIILLANSIEQNKGFSINPETFSKRKRVLHQWAIEVQERGDFSILDEKLSKLAEIYNFKKMCKRVQDELNDLEKSMKKGKNPEKEKEAYKKQKNFKIKTIWKDYPYKTHIGLIEKIKENEELNQFNIEIGKYFEHYFPIKKERCTEDEPYYLNSETIATTVNYQLKNALISYLMQIGKYKQFGLENQVLDSKKLQEIGIYEGFQTKFMDACVFATSSLKNIIEPMRSGDILGKREFKEAIATSSFVNYHHFFPYFPFELKGMKDRESELIPFGEQTEAKQMQNIWALRGSVQQIRNEIFHSFDKNQKFNLPQLDKSNFEFDASENSTGKSQSYIETDYKFLFEAEKNQLEQFFIERIKSSGALEYYPLKSLEKLFAKKEMKFSLGSQVVAFAPSYKKLVKKGHSYQTATEGTANYLGLSYYNRYELKEESFQAQYYLLKLIYQYVFLPNFSQGNSPAFRETVKAILRINKDEARKKMKKNKKFLRKYAFEQVREMEFKETPDQYMSYLQSEMREEKVRKAEKNDKGFEKNITMNFEKLLMQIFVKGFDVFLTTFAGKELLLSSEEKVIKETEISLSKKINEREKTLKASIQVEHQLVATNSAISYWLFCKLLDSRHLNELRNEMIKFKQSRIKFNHTQHAELIQNLLPIVELTILSNDYDEKNDSQNVDVSAYFEDKSLYETAPYVQTDDRTRVSFRPILKLEKYHTKSLIEALLKDNPQFRVAATDIQEWMHKREEIGELVEKRKNLHTEWAEGQQTLGAEKREEYRDYCKKIDRFNWKANKVTLTYLSQLHYLITDLLGRMVGFSALFERDLVYFSRSFSELGGETYHISDYKNLSGVLRLNAEVKPIKIKNIKVIDNEENPYKGNEPEVKPFLDRLHAYLENVIGIKAVHGKIRNQTAHLSVLQLELSMIESMNNLRDLMAYDRKLKNAVTKSMIKILDKHGMILKLKIDENHKNFEIESLIPKE

SEQ ID NO: 245 - protein, 1140 aa, Carnobacterium gallinarum
MRMTKVKINGSPVSMNRSKLNGHLVWNGTTNTVNILTKKEQSFAASFLNKTLVKADQVKGYKVLAENIFIIFEQLEKSNSEKPSVYLNNIRRLKEAGLKRFFKSKYHEEIKYTSEKNQSVPTKLNLIPLFFNAVDRIQEDKFDEKNWSYFCKEMSPYLDYKKSYLNRKKEILANSIQQNRGFSMPTAEEPNLLSKRKQLFQQWAMKFQESPLIQQNNFAVEQFNKEFANKINELAAVYNVDELCTAITEKLMNFDKDKSNKTRNFEIKKLWKQHPHNKDKALIKLFNQEGNEALNQFNIELGKYFEHYFPKTGKKESAESYYLNPQTIIKTVGYQLRNAFVQYLLQVGKLHQYNKGVLDSQTLQEIGMYEGFQTKFMDACVFASSSLRNIIQATTNEDILTREKFKKELEKNVELKHDLFFKTEIVEERDENPAKKIAMTPNELDLWAIRGAVQRVRNQIFHQQINKRHEPNQLKVGSFENGDLGNVSYQKTIYQKLFDAEIKDIEIYFAEKIKSSGALEQYSMKDLEKLFSNKELTLSLGGQVVAFAPSYKKLYKQGYFYQNEKTIELEQFTDYDFSNDVFKANYYLIKLIYHYVFLPQFSQANNKLFKDTVHYVIQQNKELNTTEKDKKNNKKIRKYAFEQVKLMKNESPEKYMQYLQREMQEERTIKEAKKTNEEKPNYNFEKLLIQIFIKGFDTFLRNFDLNLNPAEELVGTVKEKAEGLRKRKERIAKILNVDEQIKTGDEEIAFWIFAKLLDARHLSELRNEMIKFKQSSVKKGLIKNGDLIEQMQPILELCILSNDSESMEKESFDKIEVFLEKVELAKNEPYMQEDKLTPVKFRFMKQLEKYQTRNFIENLVIENPEFKVSEKIVLNWHEEKEKIADLVDKRTKLHEEWASKAREIEEYNEKIKKNKSKKLDKPAEFAKFAEYKIICEAIENFNRLDHKVRLTYLKNLHYLMIDLMGRMVGFSVLFERDFVYMGRSYSALKKQSIYLNDYDTFANIRDWEVNENKHLFGTSSSDLTFQETAEFKNLKKPMENQLKALLGVTNHSFEIRNNIAHLHVLRNDGKGEGVSLLSCMNDLRKLMSYDRKLKNAVTKAIIKILDKHGMILKLTNNDHTKPFEIESLKPKKIIHLEKSN

SEQ ID NO: 246 - protein, 1140 aa, Paludibacter propionicigenes
MRVSKVKVKDGGKDKMVLVHRKTTGAQLVYSGQPVSNETSNILPEKKRQSFDLSTLNKTIIKFDTAKKQKLNVDQYKIVEKIFKYPKQELPKQIKAEEILPFLNHKFQEPVKYWKNGKEESFNLTLLIVEAVQAQDKRKLQPYYDWKTWYIQTKSDLLKKSIENNRIDLTENLSKRKKALLAWETEFTASGSIDLTHYHKVYMTDVLCKMLQDVKPLTDDKGKINTNAYHRGLKKALQNHQPAIFGTREVPNEANRADNQLSIYHLEVVKYLEHYFPIKTSKRRNTADDIAHYLKAQTLKTTIEKQLVNAIRANIIQQGKTNHHELKADTTSNDLIRIKTNEAFVLNLTGTCAFAANNIRNMVDNEQTNDILGKGDFIKSLLKDNTNSQLYSFFFGEGLSTNKAEKETQLWGIRGAVQQIRNNVNHYKKDALKTVFNISNFENPTITDPKQQTNYADTIYKARFINELEKIPEAFAQQLKTGGAVSYYTIENLKSLLTTFQFSLCRSTIPFAPGFKKVFNGGINYQNAKQDESFYELMLEQYLRKENFAEESYNARYFMLKLIYNNLFLPGFTTDRKAFADSVGFVQMQNKKQAEKVNPRKKEAYAFEAVRPMTAADSIADYMAYVQSELMQEQNKKEEKVAEETRINFEKFVLQVFIKGFDSFLRAKEFDFVQMPQPQLTATASNQQKADKLNQLEASITADCKLTPQYAKADDATHIAFYVFCKLLDAAHLSNLRNELIKFRESVNEFKFHHLLEIIEICLLSADVVPTDYRDLYSSEADCLARLRPFIEQGADITNWSDLFVQSDKHSPVIHANIELSVKYGTTKLLEQIINKDTQFKTTEANFTAWNTAQKSIEQLIKQREDHHEQWVKAKNADDKEKQERKREKSNFAQKFIEKHGDDYLDICDYINTYNWLDNKMHFVHLNRLHGLTIELLGRMAGFVALFDRDFQFFDEQQIADEFKLHGFVNLHSIDKKLNEVPTKKIKEIYDIRNKIIQINGNKINESVRANLIQFISSKRNYYNNAFLHVSNDEIKEKQMYDIRNHIAHFNYLTKDAADFSLIDLINELRELLHYDRKLKNAVSKAFIDLFDKHGMILKLKLNADHKLKVESLEPKKIYHLGSSAKDKPEYQYCTNQVMM

SEQ ID NO: 247 - protein, 960 aa, Listeria weihenstephanensis
MLALLHQEVPSQKLHNLKSLNTESLTKLFKPKFQNMISYPPSKGAEHVQFCLTDIAVPAIRDLDEIKPDWGIFFEKLKPYTDWAESYIHYKQTTIQKSIEQNKIQSPDSPRKLVLQKYVTAFLNGEPLGLDLVAKKYKLADLAESFKVVDLNEDKSANYKIKACLQQHQRNILDELKEDPELNQYGIEVKKYIQRYFPIKRAPNRSKHARADFLKKELIESTVEQQFKNAVYHYVLEQGKMEAYELTDPKTKDLQDIRSGEAFSFKFINACAFASNNLKMILNPECEKDILGKGDFKKNLPNSTTQSDVVKKMIPFFSDEIQNVNFDEAIWAIRGSIQQIRNEVYHCKKHSWKSILKIKGFEFEPNNMKYTDSDMQKLMDKDIAKIPDFIEEKLKSSGIIRFYSHDKLQSIWEMKQGFSLLTTNAPFVPSFKRVYAKGHDYQTSKNRYYDLGLTTFDILEYGEEDFRARYFLTKLVYYQQFMPWFTADNNAFRDAANFVLRLNKNRQQDAKAFINIREVEEGEMPRDYMGYVQGQIAIHEDSTEDTPNHFEKFISQVFIKGFDSHMRSADLKFIKNPRNQGLEQSEIEEMSFDIKVEPSFLKNKDDYIAFWTFCKMLDARHLSELRNEMIKYDGHLTGEQEIIGLALLGVDSRENDWKQFFSSEREYEKIMKGYVGEELYQREPYRQSDGKTPILFRGVEQARKYGTETVIQRLFDASPEFKVSKCNITEWERQKETIEETIERRKELHNEWEKNPKKPQNNAFFKEYKECCDAIDAYNWHKNKTTLVYVNELHHLLIEILGRYVGYVAIADRDFQCMANQYFKHSGITERVEYWGDNRLKSIKKLDTFLKKEGLFVSEKNARNHIAHLNYLSLKSECTLLYLSERLREIFKYDRKLKNAVSKSLIDILDRHGMSVVFANLKENKHRLVIKSLEPKKLRHLGEKKIDNGYIETNQVSEEY

SEQ ID NO: 248 - protein, 1020 aa, Listeriaceae bacterium
MKITKMRVDGRTIVMERTSKEGQLGYEGIDGNKTTEIIFDKKKESFYKSILNKTVRKPDEKEKNRRKQAINKAINKEITELMLAVLHQEVPSQKLHNLKSLNTESLTKLFKPKFQNMISYPPSKGAEHVQFCLTDIAVPAIRDLDEIKPDWGIFFEKLKPYTDWAESYIHYKQTTIQKSIEQNKIQSPDSPRKLVLQKYVTAFLNGEPLGLDLVAKKYKLADLAESFKLVDLNEDKSANYKIKACLQQHQRNILDELKEDPELNQYGIEVKKYIQRYFPIKRAPNRSKHARADFLKKELIESTVEQQFKNAVYHYVLEQGKMEAYELTDPKTKDLQDIRSGEAFSFKFINACAFASNNLKMILNPECEKDILGKGNFKKNLPNSTTRSDVVKKMIPFFSDELQNVNFDEAIWAIRGSIQQIRNEVYHCKKHSWKSILKIKGFEFEPNNMKYADSDMQKLMDKDIAKIPEFIEEKLKSSGVVRFYRHDELQSIWEMKQGFSLLTTNAPFVPSFKRVYAKGHDYQTSKNRYYNLDLTTFDILEYGEEDFRARYFLTKLVYYQQFMPWFTADNNAFRDAANFVLRLNKNRQQDAKAFINIREVEEGEMPRDYMGYVQGQIAIHEDSIEDTPNHFEKFISQVFIKGFDRHMRSANLKFIKNPRNQGLEQSEIEEMSFDIKVEPSFLKNKDDYIAFWIFCKMLDARHLSELRNEMIKYDGHLTGEQEIIGLALLGVDSRENDWKQFFSSEREYEKIMKGYVVEELYQREPYRQSDGKTPILFRGVEQARKYGTETVIQRLFDANPEFKVSKCNLAEWERQKETIEETIKRRKELHNEWAKNPKKPQNNAFFKEYKECCDAIDAYNWHKNKTTLAYVNELHHLLIEILGRYVGYVAIADRDFQCMANQYFKHSGITERVEYWGDNRLKSIKKLDTFLKKEGLFVSEKNARNHIAHLNYLSLKSECTLLYLSERLREIFKYDRKLKNAVSKSLIDILDRHGMSVVFANLKENKHRLVIKSLEPKKLR

SEQ ID NO: 249 - protein, 1140 aa, Leptotrichia wadei
MKVTKVDGISHKKYIEEGKLVKSTSEENRTSERLSELLSIRLDIYIKNPDNASEEENRIRRENLKKFFSNKVLHLKDSVLYLKNRKEKNAVQDKNYSEEDISEYDLKNKNSFSVLKKILLNEDVNSEELEIFRKDVEAKLNKINSLKYSFEENKANYQKINENNVEKVGGKSKRNIIYDYYRESAKRNDYINNVQEAFDKLYKKEDIEKLFFLIENSKKHEKYKIREYYHKIIGRKNDKENFAKIIYEEIQNVNNIKELIEKIPDMSELKKSQVFYKYYLDKEELNDKNIKYAFCHFVEIEMSQLLKNYVYKRLSNISNDKIKRIFEYQNLKKLIENKLLNKLDTYVRNCGKYNYYLQVGEIATSDFIARNRQNEAFLRNIIGVSSVAYFSLRNILETENENDITGRMRGKTVKNNKGEEKYVSGEVDKIYNENKQNEVKENLKMFYSYDFNMDNKNEIEDFFANIDEAISSIRHGIVHFNLELEGKDIFAFKNIAPSEISKKMFQNEINEKKLKLKIFKQLNSANVFNYYEKDVIIKYLKNTKFNFVNKNIPFVPSFTKLYNKIEDLRNTLKFFWSVPKDKEEKDAQIYLLKNIYYGEFLNKFVKNSKVFFKITNEVIKINKQRNQKTGHYKYQKFENIEKTVPVEYLAIIQSREMINNQDKEEKNTYIDFIQQIFLKGFIDYLNKNNLKYIESNNNNDNNDIFSKIKIKKDNKEKYDKILKNYEKHNRNKEIPHEINEFVREIKLGKILKYTENLNMFYLILKLLNHKELTNLKGSLEKYQSANKEETFSDELELINLLNLDNNRVTEDFELEANEIGKFLDFNENKIKDRKELKKFDTNKIYFDGENIIKHRAFYNIKKYGMLNLLEKIADKAKYKISLKELKEYSNKKNEIEKNYTMQQNLHRKYARPKKDEKFNDEDYKEYEKAIGNIQKYTHLKNKVEFNELNLLQGLLLKILHRLVGYTSIWERDLRFRLKGEFPENHYIEEIFNFDNSKNVKYKSGQIVEKYINFYKELYKDNVEKRSIYSDKKVKKLKQEKKDLYIRNYIAHFNYIPHAEISLLEVLENLRKLLSYDRKLKNAIMKSIVDILKEYGFVATFKIGADKKIEIQTLESEKIVHLKNLKKKKLMTDRNSEELCE

SEQ ID NO: 250 - protein, 1260 aa, Rhodobacter capsulatus
MQIGKVQGRTISEFGDPAGGLKRKISTDGKNRKELPAHLSSDPKALIGQWISGIDKIYRKPDSRKSDGKAIHSPTPSKMQFDARDDLGEAFWKLVSEAGLAQDSDYDQFKRRLHPYGDKFQPADSGAKLKFEADPPEPQAFHGRWYGAMSKRGNDAKELAAALYEHLHVDEKRIDGQPKRNPKTDKFAPGLVVARALGIESSVLPRGMARLARNWGEEEIQTYFVVDVAASVKEVAKAAVSAAQAFDPPRQVSGRSLSPKVGFALAEHLERVTGSKRCSFDPAAGPSVLALHDEVKKTYKRLCARGKNAARAFPADKTELLALMRHTHENRVRNQMVRMGRVSEYRGQQAGDLAQSHYWTSAGQTEIKESEIFVRLWVGAFALAGRSMKAWIDPMGKIVNTEKNDRDLTAAVNIRQVISNKEMVAEAMARRGIYFGETPELDRLGAEGNEGFVFALLRYLRGCRNQTFHLGARAGFLKEIRKELEKTRWGKAKEAEHVVLTDKTVAAIRAIIDNDAKALGARLLADLSGAFVAHYASKEHFSTLYSEIVKAVKDAPEVSSGLPRLKLLLKRADGVRGYVHGLRDTRKHAFATKLPPPPAPRELDDPATKARYIALLRLYDGPFRAYASGITGTALAGPAARAKEAATALAQSVNVTKAYSDVMEGRTSRLRPPNDGETLREYLSALTGETATEFRVQIGYESDSENARKQAEFIENYRRDMLAFMFEDYIRAKGFDWILKIEPGATAMTRAPVLPEPIDTRGQYEHWQAALYLVMHFVPASDVSNLLHQLRKWEALQGKYELVQDGDATDQADARREALDLVKRFRDVLVLFLKTGEARFEGRAAPFDLKPFRALFANPATFDRLFMATPTTARPAEDDPEGDGASEPELRVARTLRGLRQIARYNHMAVLSDLFAKHKVRDEEVARLAEIEDETQEKSQIVAAQELRTDLHDKVMKCHPKTISPEERQSYAAAIKTIEEHRFLVGRVYLGDHLRLHRLMMDVIGRLIDYAGAYERDTGTFLINASKQLGAGADWAVTIAGAANTDARTQTRKDLAHFNVLDRADGTPDLTALVNRAREMMAYDRKRKNAVPRSILDMLARLGLTLKWQMKDHLLQDATITQAAIKHLDKVRLTVGGPAAVTEARFSQDYLQMVAAVFNGSVQNPKPRRRDDGDAWHKPPKPATAQSQPDQKPPNKAPSAGSRLPPPQVGEVYEGVVVKVIDTGSLGFLAVEGVAGNIGLHISRLRRIREDAIIVGRRYR

SEQ ID NO: 251 - protein, 1260 aa, Rhodobacter capsulatus
MQIGKVQGRTISEFGDPAGGLKRKISTDGKNRKELPAHLSSDPKALIGQWISGIDKIYRKPDSRKSDGKAIHSPTPSKMQFDARDDLGEAFWKLVSEAGLAQDSDYDQFKRRLHPYGDKFQPADSGAKLKFEADPPEPQAFHGRWYGAMSKRGNDAKELAAALYEHLHVDEKRIDGQPKRNPKTDKFAPGLVVARALGIESSVLPRGMARLARNWGEEEIQTYFVVDVAASVKEVAKAAVSAAQAFDPPRQVSGRSLSPKVGFALAEHLERVTGSKRCSFDPAAGPSVLALHDEVKKTYKRLCARGKNAARAFPADKTELLALMRHTHENRVRNQMVRMGRVSEYRGQQAGDLAQSHYWTSAGQTEIKESEIFVRLWVGAFALAGRSMKAWIDPMGKIVNTEKNDRDLTAAVNIRQVISNKEMVAEAMARRGIYFGETPELDRLGAEGNEGFVFALLRYLRGCRNQTFHLGARAGFLKEIRKELEKTRWGKAKEAEHVVLTDKTVAAIRAIIDNDAKALGARLLADLSGAFVAHYASKEHFSTLYSEIVKAVKDAPEVSSGLPRLKLLLKRADGVRGYVHGLRDTRKHAFATKLPPPPAPRELDDPATKARYIALLRLYDGPFRAYASGITGTALAGPAARAKEAATALAQSVNVTKAYSDVMEGRSSRLRPPNDGETLREYLSALTGETATEFRVQIGYESDSENARKQAEFIENYRRDMLAFMFEDYIRAKGFDWILKIEPGATAMTRAPVLPEPIDTRGQYEHWQAALYLVMHFVPASDVSNLLHQLRKWEALQGKYELVQDGDATDQADARREALDLVKRFRDVLVLFLKTGEARFEGRAAPFDLKPFRALFANPATFDRLFMATPTTARPAEDDPEGDGASEPELRVARTLRGLRQIARYNHMAVLSDLFAKHKVRDEEVARLAEIEDETQEKSQIVAAQELRTDLHDKVMKCHPKTISPEERQSYAAAIKTIEEHRFLVGRVYLGDHLRLHRLMMDVIGRLIDYAGAYERDTGTFLINASKQLGAGADWAVTIAGAANTDARTQTRKDLAHFNVLDRADGTPDLTALVNRAREMMAYDRKRKNAVPRSILDMLARLGLTLKWQMKDHLLQDATITQAAIKHLDKVRLTVGGPAAVTEARFSQDYLQMVAAVFNGSVQNPKPRRRDDGDAWHKPPKPATAQSQPDQKPPNKAPSAGSRLPPPQVGEVYEGVVVKVIDTGSLGFLAVEGVAGNIGLHISRLRRIREDAIIVGRRYR

SEQ ID NO: 252 - protein, 1260 aa, Rhodobacter capsulatus; identical to SEQ ID NO: 251

SEQ ID NO: 253 - protein, 1140 aa, Leptotrichia buccalis
MKVTKVGGISHKKYTSEGRLVKSESEENRTDERLSALLNMRLDMYIKNPSSTETKENQKRIGKLKKFFSNKMVYLKDNTLSLKNGKKENIDREYSETDILESDVRDKKNFAVLKKIYLNENVNSEELEVFRNDIKKKLNKINSLKYSFEKNKANYQKINENNIEKVEGKSKRNIIYDYYRESAKRDAYVSNVKEAFDKLYKEEDIAKLVLEIENLTKLEKYKIREFYHEIIGRKNDKENFAKIIYEEIQNVNNMKELIEKVPDMSELKKSQVFYKYYLDKEELNDKNIKYAFCHFVEIEMSQLLKNYVYKRLSNISNDKIKRIFEYQNLKKLIENKLLNKLDTYVRNCGKYNYYLQDGEIATSDFIARNRQNEAFLRNIIGVSSVAYFSLRNILETENENDITGRMRGKTVKNNKGEEKYVSGEVDKIYNENKKNEVKENLKMFYSYDFNMDNKNEIEDFFANIDEAISSIRHGIVHFNLELEGKDIFAFKNIAPSEISKKMFQNEINEKKLKLKIFRQLNSANVFRYLEKYKILNYLKRTRFEFVNKNIPFVPSFTKLYSRIDDLKNSLGIYWKTPKTNDDNKTKEIIDAQIYLLKNIYYGEFLNYFMSNNGNFFEISKEIIELNKNDKRNLKTGFYKLQKFEDIQEKIPKEYLANIQSLYMINAGNQDEEEKDTYIDFIQKIFLKGFMTYLANNGRLSLIYIGSDEETNTSLAEKKQEFDKFLKKYEQNNNIKIPYEINEFLREIKLGNILKYTERLNMFYLILKLLNHKELTNLKGSLEKYQSANKEEAFSDQLELINLLNLDNNRVTEDFELEADEIGKFLDFNGNKVKDNKELKKFDTNKIYFDGENIIKHRAFYNIKKYGMLNLLEKIADKAGYKISIEELKKYSNKKNEIEKNHKMQENLHRKYARPRKDEKFTDEDYESYKQAIENIEEYTHLKNKVEFNELNLLQGLLLRILHRLVGYTSIWERDLRFRLKGEFPENQYIEEIFNFENKKNVKYKGGQIVEKYIKFYKELHQNDEVKINKYSSANIKVLKQEKKDLYIRNYIAHFNYIPHAEISLLEVLENLRKLLSYDRKLKNAVMKSVVDILKEYGFVATFKIGADKKIGIQTLESEKIVHLKNLKKKKLMTDRNSEEL

SEQ ID NO: 254 - protein, 1260 aa, Herbinix hemicellulosilytica
MKLTRRRISGNSVDQKITAAFYRDMSQGLLYYDSEDNDCTDKVIESMDFERSWRGRILKNGEDDKNPFYMFVKGLVGSNDKIVCEPIDVDSDPDNLDILINKNLTGFGRNLKAPDSNDTLENLIRKIQAGIPEEEVLPELKKIKEMIQKDIVNRKEQLLKSIKNNRIPFSLEGSKLVPSTKKMKWLFKLIDVPNKTFNEKMLEKYWEIYDYDKLKANITNRLDKTDKKARSISRAVSEELREYHKNLRTNYNRFVSGDRPAAGLDNGGSAKYNPDKEEFLLFLKEVEQYFKKYFPVKSKHSNKSKDKSLVDKYKNYCSYKVVKKEVNRSIINQLVAGLIQQGKLLYYFYYNDTWQEDFLNSYGLSYIQVEEAFKKSVMTSLSWGINRLTSFFIDDSNTVKFDDITTKKAKEAIESNYFNKLRTCSRMQDHFKEKLAFFYPVYVKDKKDRPDDDIENLIVLVKNAIESVSYLRNRTFHFKESSLLELLKELDDKNSGQNKIDYSVAAEFIKRDIENLYDVFREQIRSLGIAEYYKADMISDCFKTCGLEFALYSPKNSLMPAFKNVYKRGANLNKAYIRDKGPKETGDQGQNSYKALEEYRELTWYIEVKNNDQSYNAYKNLLQLIYYHAFLPEVRENEALITDFINRTKEWNRKETEERLNTKNNKKHKNFDENDDITVNTYRYESIPDYQGESLDDYLKVLQRKQMARAKEVNEKEEGNNNYIQFIRDVVVWAFGAYLENKLKNYKNELQPPLSKENIGLNDTLKELFPEEKVKSPFNIKCRFSISTFIDNKGKSTDNTSAEAVKTDGKEDEKDKKNIKRKDLLCFYLFLRLLDENEICKLQHQFIKYRCSLKERRFPGNRTKLEKETELLAELEELMELVRFTMPSIPEISAKAESGYDTMIKKYFKDFIEKKVFKNPKTSNLYYHSDSKTPVTRKYMALLMRSAPLHLYKDIFKGYYLITKKECLEYIKLSNIIKDYQNSLNELHEQLERIKLKSEKQNGKDSLYLDKKDFYKVKEYVENLEQVARYKHLQHKINFESLYRIFRIHVDIAARMVGYTQDWERDMHFLFKALVYNGVLEERRFEAIFNNNDDNNDGRIVKKIQNNLNNKNRELVSMLCWNKKLNKNEFGAIIWKRNPIAHLNHFTQTEQNSKSSLESLINSLRILLAYDRKRQNAVTKTINDLLLNDYHIRIKWEGRVDEGQIYFNIKEKEDIENEPIIHLKHLHKKDCYIYKNSYMFDKQKEWICNGIKEEVYDKSI

SEQ ID NO: 255 - protein, 1320 aa, Eubacterium rectale
MLRRDKEVKKLYNVFNQIQVGTKPKKWNNDEKLSPEENERRAQQKNIKMKNYKWREACSKYVESSQRIINDVIFYSYRKAKNKLRYMRKNEDILKKMQEAEKLSKFSGGKLEDFVAYTLRKSLVVSKYDTQEFDSLAAMVVFLECIGKNNISDHEREIVCKLLELIRKDFSKLDPNVKGSQGANIVRSVRNQNMIVQPQGDRFLFPQVYAKENETVTNKNVEKEGLNEFLLNYANLDDEKRAESLRKLRRILDVYFSAPNHYEKDMDITLSDNIEKEKFNVWEKHECGKKETGLFVDIPDVLMEAEAENIKLDAVVEKRERKVLNDRVRKQNIICYRYTRAVVEKYNSNEPLFFENNAINQYWIHHIENAVERILKNCKAGKLFKLRKGYLAEKVWKDAINLISIKYIALGKAVYNFALDDIWKDKKNKELGIVDERIRNGITSFDYEMIKAHENLQRELAVDIAFSVNNLARAVCDMSNLGNKESDFLLWKRNDIADKLKNKDDMASVSAVLQFFGGKSSWDINIFKDAYKGKKKYNYEVRFIDDLRKAIYCARNENFHFKTALVNDEKWNTELFGKIFERETEFCLNVEKDRFYSNNLYMFYQVSELRNMLDHLYSRSVSRAAQVPSYNSVIVRTAFPEYITNVLGYQKPSYDADTLGKWYSACYYLLKEIYYNSFLQSDRALQLFEKSVKTLSWDDKKQQRAVDNFKDHFSDIKSACTSLAQVCQIYMTEYNQQNNQIKKVRSSNDSIFDQPVYQHYKVLLKKAIANAFADYLKNNKDLFGFIGKPFKANEIREIDKEQFLPDWTSRKYEALCIEVSGSQELQKWYIVGKFLNARSLNLMVGSMRSYIQYVTDIKRRAASIGNELHVSVHDVEKVEKWVQVIEVCSLLASRTSNQFEDYFNDKDDYARYLKSYVDFSNVDMPSEYSALVDFSNEEQSDLYVDPKNPKVNRNIVHSKLFAADHILRDIVEPVSKDNIEEFYSQKAEIAYCKIKGKEITAEEQKAVLKYQKLKNRVELRDIVEYGEIINELLGQLINWSFMRERDLLYFQLGFHYDCLRNDSKKPEGYKNIKVDENSIKDAILYQIIGMYVNGVTVYAPEKDGDKLKEQCVKGGVGVKVSAFHRYSKYLGLNEKTLYNAGLEIFEVVAEHEDIINLRNGIDHFKYYLGDYRSMLSIYSEVFDRFFTYDIKYQKNVLNLLQNILLRHNVIVEPILESGFKTIGEQTKPGAKLSIRSIKSDTFQYKVKGGTLITDAKDERYLETIRKILYYAENEEDNLKKSVVVTNADKYEKNKESDDQNKQKEKKNKDNKGKKNEETKS

SEQ ID NO: 256 - protein, 1373 aa, Eubacteriaceae bacterium; identical to SEQ ID NO: 165

SEQ ID NO: 257 - protein, 1260 aa, Blautia species
MKISKVDHVKSGIDQKLSSQRGMLYKQPQKKYEGKQLEEHVRNLSRKAKALYQVFPVSGNSKMEKELQIINSFIKNILLRLDSGKTSEEIVGYINTYSVASQISGDHIQELVDQHLKESLRKYTCVGDKRIYVPDIIVALLKSKFNSETLQYDNSELKILIDFIREDYLKEKQIKQIVHSIENNSTPLRIAEINGQKRLIPANVDNPKKSYIFEFLKEYAQSDPKGQESLLQHMRYLILLYLYGPDKITDDYCEEIEAWNFGSIVMDNEQLFSEEASMLIQDRIYVNQQIEEGRQSKDTAKVKKNKSKYRMLGDKIEHSINESVVKHYQEACKAVEEKDIPWIKYISDHVMSVYSSKNRVDLDKLSLPYLAKNTWNTWISFIAMKYVDMGKGVYHFAMSDVDKVGKQDNLIIGQIDPKFSDGISSFDYERIKAEDDLHRSMSGYIAFAVNNFARAICSDEFRKKNRKEDVLTVGLDEIPLYDNVKRKLLQYFGGASNWDDSIIDIIDDKDLVACIKENLYVARNVNFHFAGSEKVQKKQDDILEEIVRKETRDIGKHYRKVFYSNNVAVFYCDEDIIKLMNHLYQREKPYQAQIPSYNKVISKTYLPDLIFMLLKGKNRTKISDPSIMNMFRGTFYFLLKEIYYNDFLQASNLKEMFCEGLKNNVKNKKSEKPYQNFMRRFEELENMGMDFGEICQQIMTDYEQQNKQKKKTATAVMSEKDKKIRTLDNDTQKYKHFRTLLYIGLREAFIIYLKDEKNKEWYEFLREPVKREQPEEKEFVNKWKLNQYSDCSELILKDSLAAAWYVVAHFINQAQLNHLIGDIKNYIQFISDIDRRAKSTGNPVSESTEIQIERYRKILRVLEFAKFFCGQITNVLTDYYQDENDFSTHVGHYVKFEKKNMEPAHALQAFSNSLYACGKEKKKAGFYYDGMNPIVNRNITLASMYGNKKLLENAMNPVTEQDIRKYYSLMAELDSVLKNGAVCKSEDEQKNLRHFQNLKNRIELVDVLTLSELVNDLVAQLIGWVYIRERDMMYLQLGLHYIKLYFTDSVAEDSYLRTLDLEEGSIADGAVLYQIASLYSFNLPMYVKPNKSSVYCKKHVNSVATKFDIFEKEYCNGDETVIENGLRLFENINLHKDMVKFRDYLAHFKYFAKLDESILELYSKAYDFFFSYNIKLKKSVSYVLTNVLLSYFINAKLSFSTYKSSGNKTVQHRTTKISVVAQTDYFTYKLRSIVKNKNGVESIENDDRRCEVVNIAARDK

SEQ ID NO: 258 - protein, 1380 aa, Leptotrichia species
MGNLFGHKRWYEVRDKKDFKIKRKVKVKRNYDGNKYILNINENNNKEKIDNNKFIGEFVNYKKNNNVLKEFKRKFHAGNILFKLKGKEEIIRIENNDDFLETEEVVLYIEVYGKSEKLKALEITKKKIIDEAIRQGITKDDKKIEIKRQENEEEIEIDIRDEYTNKTLNDCSIILRIIENDELETKKSIYEIFKNINMSLYKIIEKIIENETEKVFENRYYEEHLREKLLKDNKIDVILTNFMEIREKIKSNLEIMGFVKFYLNVSGDKKKSENKKMFVEKILNTNVDLTVEDIVDFIVKELKFWNITKRIEKVKKFNNEFLENRRNRTYIKSYVLLDKHEKFKIERENKKDKIVKFFVENIKNNSIKEKIEKILAEFKINELIKKLEKELKKGNCDTEIFGIFKKHYKVNFDSKKFSNKSDEEKELYKIIYRYLKGRIEKILVNEQKVRLKKMEKIEIEKILNESILSEKILKRVKQYTLEHIMYLGKLRHNDIVKMTVNTDDFSRLHAKEELDLELITFFASTNMELNKIFNGKEKVTDFFGFNLNGQKITLKEKVPSFKLNILKKLNFINNENNIDEKLSHFYSFQKEGYLLRNKILHNSYGNIQETKNLKGEYENVEKLIKELKVSDEEISKSLSLDVIFEGKVDIINKINSLKIGEYKDKKYLPSFSKIVLEITRKFREINKDKLFDIESEKIILNAVKYVNKILYEKITSNEENEFLKTLPDKLVKKSNNKKENKNLLSIEEYYKNAQVSSSKGDKKAIKKYQNKVTNAYLEYLENTFTEIIDFSKFNLNYDEIKTKIEERKDNKSKIIIDSISTNINITNDIEYIISIFALLNSNTYINKIRNRFFATSVWLEKQNGTKEYDYENIISILDEVLLINLLRENNITDILDLKNAIIDAKIVENDETYIKNYIFESNEEKLKKRLFCEELVDKEDIRKIFEDENFKFKSFIKKNEIGNFKINFGILSNLECNSEVEAKKIIGKNSKKLESFIQNIIDEYKSNIRTLFSSEFLEKYKEEIDNLVEDTESENKNKFEKIYYPKEHKNELYIYKKNLFLNIGNPNFDKIYGLISKDIKNVDTKILFDDDIKKNKISEIDAILKNLNDKLNGYSNDYKAKYVNKLKENDDFFAKNIQNENYSSFGEFEKDYNKVSEYKKIRDLVEFNYLNKIESYLIDINWKLAIQMARFERDMHYIVNGLRELGIIKLSGYNTGISRAYPKRNGSDGFYTTTAYYKFFDEESYKKFEKICYGFGIDLSENSEINKPENESIRNYISHFYIVRNPFADYSIAEQIDRVSNLLSYSTRYNNSTYASVFEVFKKDVNLDYDELKKKFRLIGNNDILERLMKPKKVSVLELESYNSDYIKNLIIELLTKIEN

SEQ ID NO: 259 - protein, 1200 aa, Bergeyella zoohelcum
MENKTSLGNNIYYNPFKPQDKSYFAGYFNAAMENTDSVFRELGKRLKGKEYTSENFFDAIFKENISLVEYERYVKLLSDYFPMARLLDKKEVPIKERKENFKKNFKGIIKAVRDLRNFYTHKEHGEVEITDEIFGVLDEMLKSTVLTVKKKKVKTDKTKEILKKSIEKQLDILCQKKLEYLRDTARKIEEKRRNQRERGEKELVAPFKYSDKRDDLIAAIYNDAFDVYIDKKKDSLKESSKAKYNTKSDPQQEEGDLKIPISKNGVVFLLSLFLTKQEIHAFKSKIAGFKATVIDEATVSEATVSHGKNSICFMATHEIFSHLAYKKLKRKVRTAEINYGEAENAEQLSVYAKETLMMQMLDELSKVPDVVYQNLSEDVQKTFIEDWNEYLKENNGDVGTMEEEQVIHPVIRKRYEDKFNYFAIRFLDEFAQFPTLRFQVHLGNYLHDSRPKENLISDRRIKEKITVFGRLSELEHKKALFIKNTETNEDREHYWEIFPNPNYDFPKENISVNDKDFPIAGSILDREKQPVAGKIGIKVKLLNQQYVSEVDKAVKAHQLKQRKASKPSIQNIIEEIVPINESNPKEAIVFGGQPTAYLSMNDIHSILYEFFDKWEKKKEKLEKKGEKELRKEIGKELEKKIVGKIQAQIQQIIDKDTNAKILKPYQDGNSTAIDKEKLIKDLKQEQNILQKLKDEQTVREKEYNDFIAYQDKNREINKVRDRNHKQYLKDNLKRKYPEAPARKEVLYYREKGKVAVWLANDIKRFMPTDFKNEWKGEQHSLLQKSLAYYEQCKEELKNLLPEKVFQHLPFKLGGYFQQKYLYQFYTCYLDKRLEYISGLVQQAENFKSENKVFKKVENECFKFLKKQNYTHKELDARVQSILGYPIFLERGFMDEKPTIIKGKTFKGNEALFADWFRYYKEYQNFQTFYDTENYPLVELEKKQADRKRKTKIYQQKKNDVFTLLMAKHIFKSVFKQDSIDQFSLEDLYQSREERLGNQERARQTGERNTNYIWNKTVDLKLCDGKITVENVKLKNVGDFIKYEYDQRVQAFLKYEENIEWQAFLIKESKEEENYPYVVEREIEQYEKVRREELLKEVHLIEEYILEKVKDKEILKKGDNQNFKYYILNGLLKQLKNEDVESYKVFNLNTEPEDVNINQLKQEATDLEQKAFVLTYIRNKFAHNQLPKKEFWDYCQEKYGK

SEQ ID NO: 260 - protein, 1080 aa, Prevotella intermedia
MEDDKKTTDSIRYELKDKHFWAAFLNLARHNVYITVNHINKILEEGEINRDGYETTLKNTWNEIKDINKKDRLSKLIIKHFPFLEAATYRLNPTDTTKQKEEKQAEAQSLESLRKSFFVFIYKLRDLRNHYSHYKHSKSLERPKFEEGLLEKMYNIFNASIRLVKEDYQYNKDINPDEDFKHLDRTEEEFNYYFTKDNEGNITESGLLFFVSLFLEKKDAIWMQQKLRGFKDNRENKKKMTNEVFCRSRMLLPKLRLQSTQTQDWILLDMLNELIRCPKSLYERLREEDREKFRVPIEIADEDYDAEQEPFKNTLVRHQDRFPYFALRYFDYNEIFTNLRFQIDLGTYHFSIYKKQIGDYKESHHLTHKLYGFERIQEFTKQNRPDEWRKFVKTFNSFETSKEPYIPETTPHYHLENQKIGIRFRNDNDKIWPSLKTNSEKNEKSKYKLDKSFQAEAFLSVHELLPMMFYYLLLKTENTDNDNEIETKKKENKNDKQEKHKIEEIIENKITEIYALYDTFANGEIKSIDELEEYCKGKDIEIGHLPKQMIAILKDEHKVMATEAERKQEEMLVDVQKSLESLDNQINEEIENVERKNSSLKSGKIASWLVNDMMRFQPVQKDNEGKPLNNSKANSTEYQLLQRTLAFFGSEHERLAPYFKQTKLIESSNPHPFLKDTEWEKCNNILSFYRSYLEAKKNFLESLKPEDWEKNQYFLKLKEPKTKPKTLVQGWKNGFNLPRGIFTEPIRKWFMKHRENITVAELKRVGLVAKVIPLFFSEEYKDSVQPFYNYHFNVGNINKPDEKNFLNCEERRELLRKKKDEFKKMTDKEKEENPSYLEFKSWNKFERELRLVRNQDIVTWLLCMELFNKKKIKELNVEKIYLKNINTNTTKKEKNTEEKNGEEKNIKEKNNILNRIMPMRLPIKVYGRENFSKNKKKKIRRNTFFTVYIEEKGTKLLKQGNFKALERDRRLGGLFSFVKTPSKAESKSNTISKLRVEYELGEYQKARIEIIKDMLALEKTLIDKYNSLDTDNFNKMLTDWLELKGEPDKASFQNDVDLLIAVRNAFSHNQYPMRNRIAFA

SEQ ID NO: 261 - protein, 1080 aa, Prevotella buccae
MQKQDKLFVDRKKNAIFAFPKYITIMENKEKPEPIYYELTDKHFWAAFLNLARHNVYTTINHINRRLEIAELKDDGYMMGIKGSWNEQAKKLDKKVRLRDLIMKHFPFLEAAAYEMTNSKSPNNKEQREKEQSEALSLNNLKNVLFIFLEKLQVLRNYYSHYKYSEESPKPIFETSLLKNMYKVFDANVRLVKRDYMHHENIDMQRDFTHLNRKKQVGRTKNIIDSPNFHYHFADKEGNMTIAGLLFFVSLFLDKKDAIWMQKKLKGFKDGRNLREQMTNEVFCRSRISLPKLKLENVQTKDWMQLDMLNELVRCPKSLYERLREKDRESFKVPFDIFSDDYNAEEEPFKNTLVRHQDRFPYFVLRYFDLNEIFEQLRFQIDLGTYHFSIYNKRIGDEDEVRHLTHHLYGFARIQDFAPQNQPEEWRKLVKDLDHFETSQEPYISKTAPHYHLENEKIGIKFCSAHNNLFPSLQTDKTCNGRSKFNLGTQFTAEAFLSVHELLPMMFYYLLLTKDYSRKESADKVEGIIRKEISNIYAIYDAFANNEINSIADLTRRLQNTNILQGHLPKQMISILKGRQKDMGKEAERKIGEMIDDTQRRLDLLCKQTNQKIRIGKRNAGLLKSGKIADWLVNDMMRFQPVQKDQNNIPINNSKANSTEYRMLQRALALFGSENFRLKAYFNQMNLVGNDNPHPFLAETQWEHQTNILSFYRNYLEARKKYLKGLKPQNWKQYQHFLILKVQKTNRNTLVTGWKNSFNLPRGIFTQPIREWFEKHNNSKRIYDQILSFDRVGFVAKAIPLYFAEEYKDNVQPFYDYPFNIGNRLKPKKRQFLDKKERVELWQKNKELFKNYPSEKKKTDLAYLDFLSWKKFERELRLIKNQDIVTWLMFKELFNMATVEGLKIGEIHLRDIDTNTANEESNNILNRIMPMKLPVKTYETDNKGNILKERPLATFYIEETETKVLKQGNFKALVKDRRLNGLFSFAETTDLNLEEHPISKLSVDLELIKYQTTRISIFEMTLGLEKKLIDKYSTLPTDSFRNMLERWLQCKANRPELKNYVNSLIAVRNAFSHNQYPMYD

SEQ ID NO: 262 - protein, 953 aa, Alistipes species; identical to SEQ ID NO: 198

SEQ ID NO: 263 - protein, 1320 aa, Prevotella species
MSKECKKQRQEKKRRLQKANFSISLTGKHVFGAYFNMARTNFVKTINYILPIAGVRGNYSENQINKMLHALFLIQAGRNEELTTEQKQWEKKLRLNPEQQTKFQKLLFKHFPVLGPMMADVADHKAYLNKKKSTVQTEDETFAMLKGVSLADCLDIICLMADTLTECRNFYTHKDPYNKPSQLADQYLHQEMIAKKLDKVVVASRRILKDREGLSVNEVEFLTGIDHLHQEVLKDEFGNAKVKDGKVMKTFVEYDDFYFKISGKRLVNGYTVTTKDDKPVNVNTMLPALSDFGLLYFCVLFLSKPYAKLFIDEVRLFEYSPFDDKENMIMSEMLSIYRIRTPRLHKIDSHDSKATLAMDIFGELRRCPMELYNLLDKNAGQPFFHDEVKHPNSHTPDVSKRLRYDDRFPTLALRYIDETELFKRIRFQLQLGSFRYKFYDKENCIDGRVRVRRIQKEINGYGRMQEVADKRMDKWGDLIQKREERSVKLEHEELYINLDQFLEDTADSTPYVTDRRPAYNIHANRIGLYWEDSQNPKQYKVFDENGMYIPELVVTEDKKAPIKMPAPRCALSVYDLPAMLFYEYLREQQDNEFPSAEQVIIEYEDDYRKFFKAVAEGKLKPFKRPKEFRDFLKKEYPKLRMADIPKKLQLFLCSHGLCYNNKPETVYERLDRLTLQHLEERELHIQNRLEHYQKDRDMIGNKDNQYGKKSFSDVRHGALARYLAQSMMEWQPTKLKDKEKGHDKLTGLNYNVLTAYLATYGHPQVPEEGFTPRTLEQVLINAHLIGGSNPHPFINKVLALGNRNIEELYLHYLEEELKHIRSRIQSLSSNPSDKALSALPFIHHDRMRYHERTSEEMMALAARYTTIQLPDGLFTPYILEILQKHYTENSDLQNALSQDVPVKLNPTCNAAYLITLFYQTVLKDNAQPFYLSDKTYTRNKDGEKAESFSFKRAYELFSVLNNNKKDTFPFEMIPLFLTSDEIQERLSAKLLDGDGNPVPEVGEKGKPATDSQGNTIWKRRIYSEVDDYAEKLTDRDMKISFKGEWEKLPRWKQDKIIKRRDETRRQMRDELLQRMPRYIRDIKDNERTLRRYKTQDMVLFLLAEKMFTNIISEQSSEFNWKQMRLSKVCNEAFLRQTLTFRVPVTVGETTIYVEQENMSLKNYGEFYRFLTDDRLMSLLNNIVETLKPNENGDLVIRHTDLMSELAAYDQYRSTIFMLIQSIENLIITNNAVLDDPDADGFWVREDLPKRNNFASLLELINQLNNVELTDDERKLLVAIRNAFSHNSYNIDFSLIKDVKHLPEVAKGILQHLQSMLGVEI

SEQ ID NO: 264 - protein, 1080 aa, Riemerella anatipestifer
MEKPLLPNVYTLKHKFFWGAFLNIARHNAFITICHINEQLGLKTPSNDDKIVDVVCETWNNILNNDHDLLKKSQLTELILKHFPFLTAMCYHPPKKEGKKKGHQKEQQKEKESEAQSQAEALNPSKLIEALEILVNQLHSLRNYYSHYKHKKPDAEKDIFKHLYKAFDASLRMVKEDYKAHFTVNLTRDFAHLNRKGKNKQDNPDFNRYRFEKDGFFTESGLLFFTNLFLDKRDAYWMLKKVSGFKASHKQREKMTTEVFCRSRILLPKLRLESRYDHNQMLLDMLSELSRCPKLLYEKLSEENKKHFQVEADGFLDEIEEEQNPFKDTLIRHQDRFPYFALRYLDLNESFKSIRFQVDLGTYHYCIYDKKIGDEQEKRHLTRTLLSFGRLQDFTEINRPQEWKALTKDLDYKETSNQPFISKTTPHYHITDNKIGFRLGTSKELYPSLEIKDGANRIAKYPYNSGFVAHAFISVHELLPLMFYQHLTGKSEDLLKETVRHIQRIYKDFEEERINTIEDLEKANQGRLPLGAFPKQMLGLLQNKQPDLSEKAKIKIEKLIAETKLLSHRLNTKLKSSPKLGKRREKLIKTGVLADWLVKDFMRFQPVAYDAQNQPIKSSKANSTEFWFIRRALALYGGEKNRLEGYFKQTNLIGNTNPHPFLNKFNWKACRNLVDFYQQYLEQREKFLEAIKNQPWEPYQYCLLLKIPKENRKNLVKGWEQGGISLPRGLFTEAIRETLSEDLMLSKPIRKEIKKHGRVGFISRAITLYFKEKYQDKHQSFYNLSYKLEAKAPLLKREEHYEYWQQNKPQSPTESQRLELHTSDRWKDYLLYKRWQHLEKKLRLYRNQDVMLWLMTLELTKNHFKELNLNYHQLKLENLAVNVQEADAKLNPLNQTLPMVLPVKVYPATAFGEVQYHKTPIRTVYIREEHTKALKMGNFKALVKDRRLNGLFSFIKEENDTQKHPISQLRLRRELEIYQSLRVDAFKETLSLEEKLLNKHTSLSSLENEFRALLEEWKKEYAASSMVTDEHIAFIASVRNAFCHNQYPFYKEALHAPIPLFTVAQPTTEEKDGLGIAEAL

SEQ ID NO: 265 - protein, 1080 aa, Prevotella aurantiaca
MEDDKKTTGSISYELKDKHFWAAFLNLARHNVYITINHINKLLEIREIDNDEKVLDIKTLWQKGNKDLNQKARLRELMTKHFPFLETAIYTKNKEDKKEVKQEKQAEAQSLESLKDCLFLFLDKLQEARNYYSHYKYSEFSKEPEFEEGLLEKMYNIFGNNIQLVINDYQHNKDINPDEDFKHLDRKGQFKYSFADNEGNITESGLLFFVSLFLEKKDAIWMQQKLNGFKDNLENKKKMTHEVFCRSRILMPKLRLESTQTQDWILLDMLNELIRCPKSLYERLQGDDREKFKVPFDPADEDYNAEQEPFKNTLIRHQDRFPYFVLRYFDYNEIFKNLRFQIDLGTYHFSIYKKLIGGQKEDRHLTHKLYGFERIQEFAKQNRPDEWKAIVKDLDTYETSNKRYISETTPHYHLENQKIGIRFRNGNKEIWPSLKTNDENNEKSKYKLDKQYQAEAFLSVHELLPMMFYYLLLKKEKPNNDEINASIVEGFIKREIRNIFKLYDAFANGEINNIDDLEKYCADKGIPKRHLPKQMVAILYDEHKDMVKEAKRKQKEMVKDTKKLLATLEKQTQKEKEDDGRNVKLLKSGEIARWLVNDMMRFQPVQKDNEGKPLNNSKANSTEYQMLQRSLALYNNEEKPTRYFRQVNLIESNNPHPFLKWTKWEECNNILTFYYSYLTKKIEFLNKLKPEDWKKNQYFLKLKEPKTNRETLVQGWKNGFNLPRGIFTEPIREWFKRHQNNSKEYEKVEALDRVGLVTKVIPLFFKEEYFKDKEENFKEDTQKEINDCVQPFYNFPYNVGNIHKPKEKDFLHREERIELWDKKKDKFKGYKEKIKSKKLTEKDKEEFRSYLEFQSWNKFERELRLVRNQDIVTWLLCKELIDKLKIDELNIEELKKLRLNNIDTDTAKKEKNNILNRVMPMELPVTVYEIDDSHKIVKDKPLHTIYIKEAETKLLKQGNFKALVKDRRLNGLFSFVKTNSEAESKRNPISKLRVEYELGEYQEARIEIIQDMLALEEKLINKYKDLPTNKFSEMLNSWLEGKDEADKARFQNDVDFLIAVRNAFSHNQYPMHNKIEFANI

SEQ ID NO: 266 - protein, 1140 aa, Prevotella saccharolytica
MEDKPFWAAFFNLARHNVYLTVNHINKLLDLEKLYDEGKHKEIFEREDIFNISDDVMNDANSNGKKRKLDIKKIWDDLDTDLTRKYQLRELILKHFPFIQPAIIGAQTKERTTIDKDKRSTSTSNDSLKQTGEGDINDLLSLSNVKSMFFRLLQILEQLRNYYSHVKHSKSATMPNFDEDLLNWMRYIFIDSVNKVKEDYSSNSVIDPNTSFSHLIYKDEQGKIKPCRYPFTSKDGSINAFGLLFFVSLFLEKQDSIWMQKKIPGFKKASENYMKMTNEVFCRNHILLPKIRLETVYDKDWMLLDMLNEVVRCPLSLYKRLTPAAQNKFKVPEKSSDNANRQEDDNPFSRILVRHQNRFPYFVLRFFDLNEVFTTLRFQINLGCYHFAICKKQIGDKKEVHHLIRTLYGFSRLQNFTQNTRPEEWNTLVKTTEPSSGNDGKTVQGVPLPYISYTIPHYQIENEKIGIKIFDGDTAVDTDIWPSVSTEKQLNKPDKYTLTPGFKADVFLSVHELLPMMFYYQLLLCEGMLKTDAGNAVEKVLIDTRNAIFNLYDAFVQEKINTITDLENYLQDKPILIGHLPKQMIDLLKGHQRDMLKAVEQKKAMLIKDTERRLKLLDKQLKQETDVAAKNTGTLLKNGQIADWLVNDMMRFQPVKRDKEGNPINCSKANSTEYQMLQRAFAFYATDSCRLSRYFTQLHLIHSDNSHLFLSRFEYDKQPNLIAFYAAYLKAKLEFLNELQPQNWASDNYFLLLRAPKNDRQKLAEGWKNGFNLPRGLFTEKIKTWFNEHKTIVDISDCDIFKNRVGQVARLIPVFFDKKFKDHSQPFYRYDFNVGNVSKPTEANYLSKGKREELFKSYQNKFKNNIPAEKTKEYREYKNFSLWKKFERELRLIKNQDILIWLMCKNLFDEKIKPKKDILEPRIAVSYIKLDSLQTNTSTAGSLNALAKVVPMTLAIHIDSPKPKGKAGNNEKENKEFTVYIKEEGTKLLKWGNFKTLLADRRIKGLFSYIEHDDIDLKQHPLTKRRVDLELDLYQTCRIDIFQQTLGLEAQLLDKYSDLNTDNFYQMLIGWRKKEGIPRNIKEDTDFLKDVRNAFSHNQYPDSKKIAFRRIRKFNPKELILEEEEGLGIATQMYKEVEKV

SEQ ID NO: 267 - protein, 1080 aa, Prevotella intermedia
MEDDKKTTDSIRYELKDKHFWAAFLNLARHNVYITVNHINKILEEDEINRDGYENTLENSWNEIKDINKKDRLSKLIIKHFPFLEATTYRQNPTDTTKQKEEKQAEAQSLESLKKSFFVFIYKLRDLRNHYSHYKHSKSLERPKFEEDLQNKMYNIFDVSIQFVKEDYKHNTDINPKKDFKHLDRKRKGKFHYSFADNEGNITESGLLFFVSLFLEKKDAIWVQKKLEGFKCSNKSYQKMTNEVFCRSRMLLPKLRLESTQTQDWILLDMLNELIRCPKSLYERLQGVNRKKFYVSFDPADEDYDAEQEPFKNTLVRHQDRFPYFALRYFDYNEVFANLRFQIDLGTYHFSIYKKLIGGQKEDRHLTHKLYGFERIQEFDKQNRPDEWKAIVKDSDTFKKKEEKEEEKPYISETTPHYHLENKKIGIAFKNHNIWPSTQTELTNNKRKKYNLGTSIKAEAFLSVHELLPMMFYYLLLKTENTKNDNKVGGKKETKKQGKHKIEAIIESKIKDIYALYDAFANGEINSEDELKEYLKGKDIKIVHLPKQMIAILKNEHKDMAEKAEAKQEKMKLATENRLKTLDKQLKGKIQNGKRYNSAPKSGEIASWLVNDMMRFQPVQKDENGESLNNSKANSTEYQLLQRTLAFFGSEHERLAPYFKQTKLIESSNPHPFLNDTEWEKCSNILSFYRSYLKARKNFLESLKPEDWEKNQYFLMLKEPKTNRETLVQGWKNGFNLPRGFFTEPIRKWFMEHWKSIKVDDLKRVGLVAKVTPLFFSEKYKDSVQPFYNYPFNVGDVNKPKEEDFLHREERIELWDKKKDKFKGYKAKKKFKEMTDKEKEEHRSYLEFQSWNKFERELRLVRNQDIVTWLLCTELIDKLKIDELNIKELKKLRLKDINTDTAKKEKNNILNRVMPMELPVTVYKVNKGGYIIKNKPLHTIYIKEAETKLLKQGNFKALVKDRRLNGLFSFVKTPSEAESESNPISKLRVEYELGKYQNARLDIIEDMLALEKKLIDKYNSLDTDNFHNMLTGWLELKGEAKKARFQNDVKLLTAVRNAFSHNQYPMYDENLFGNIERFSL

SEQ ID NO: 268 - protein, 1199 aa, Capnocytophaga canimorsus; identical to SEQ ID NO: 189

SEQ ID NO: 269 - protein, 1140 aa, Porphyromonas gulae
MTEQSERPYNGTYYTLEDKHFWAAFLNLARHNAYITLTHIDRQLAYSKADITNDQDVLSFKALWKNFDNDLERKSRLRSLILKHFSFLEGAAYGKKLFESKSSGNKSSKNKELTKKEKEELQANALSLDNLKSILFDFLQKLKDFRNYYSHYRHSGSSELPLFDGNMLQRLYNVFDVSVQRVKIDHEHNDEVDPHYHFNHLVRKGKKDRYGHNDNPSFKHHFVDGEGMVTEAGLLFFVSLFLEKRDAIWMQKKIRGFKGGTETYQQMTNEVFCRSRISLPKLKLESLRMDDWMLLDMLNELVRCPKPLYDRLREDDRACFRVPVDILPDEDDTDGGGEDPFKNTLVRHQDRFPYFALRYFDLKKVFTSLRFHIDLGTYHFAIYKKMIGEQPEDRHLTRNLYGFGRIQDFAEEHRPEEWKRLVRDLDYFETGDKPYISQTSPHYHIEKGKIGLRFMPEGQHLWPSPEVGTTRTGRSKYAQDKRLTAEAFLSVHELMPMMFYYFLLREKYSEEVSAERVQGRIKRVIEDVYAVYDAFARDEINTRDELDACLADKGIRRGHLPRQMIAILSQEHKDMEEKIRKKLQEMMADTDHRLDMLDRQTDRKIRIGRKNAGLPKSGVIADWLVRDMMRFQPVAKDASGKPLNNSKANSTEYRMLQRALALFGGEKERLTPYFRQMNLTGGNNPHPFLHETRWESHTNILSFYRSYLRARKAFLERIGRSDRVENRPFLLLKEPKTDRQTLVAGWKGEFHLPRGIFTEAVRDCLIEMGHDEVASYKEVGFMAKAVPLYFERACEDRVQPFYDSPFNVGNSLKPKKGRFLSKEERAEEWERGKERFRDLEAWSYSAARRIEDAFAGIEYASPGNKKKIEQLLRDLSLWEAFESKLKVRADRINLAKLKKEILEAQEHPYHDFKSWQKFERELRLVKNQDIITWMMCRDLMEENKVEGLDTGTLYLKDIRPNVQEQGSLNVLNRVKPMRLPVVVYRADSRGHVHKEEAPLATVYIEERDTKLLKQGNFKSFVKDRRLNGLFSFVDTGGLAMEQYPISKLRVEYELAKYQTARVCVFELTLRLEESLLTRYPHLPDESFREMLESWSDPLLAKWPELHGKVRLLIAVRNAFSHNQYPMYDEAVFSSIRKYDP

SEQ ID NO: 270 - protein, 1080 aa, Prevotella species
MNIPALVENQKKYFGTYSVMAMLNAQTVLDHIQKVADIEGEQNENNENLWFHPVMSHLYNAKNGYDKQPEKTMFIIERLQSYFPFLKIMAENQREYSNGKYKQNRVEVNSNDIFEVLKRAFGVLKMYRDLTNHYKTYEEKLNDGCEFLTSTEQPLSGMINNYYTVALRNMNERYGYKTEDLAFIQDKRFKFVKDAYGKKKSQVNTGFFLSLQDYNGDTQKKLHLSGVGIALLICLFLDKQYINIFLSRLPIFSSYNAQSEERRIIIRSFGINSIKLPKDRIHSEKSNKSVAMDMLNEVKRCPDELFTTLSAEKQSRFRIISDDHNEVLMKRSSDRFVPLLLQYIDYGKLFDHIRFHVNMGKLRYLLKADKTCIDGQTRVRVIEQPLNGFGRLEEAETMRKQENGTFGNSGIRIRDFENMKRDDANPANYPYIVDTYTHYILENNKVEMFINDKEDSAPLLPVIEDDRYVVKTIPSCRMSTLEIPAMAFHMFLFGSKKTEKLIVDVHNRYKRLFQAMQKEEVTAENIASFGIAESDLPQKILDLISGNAHGKDVDAFIRLTVDDMLTDTERRIKRFKDDRKSIRSADNKMGKRGFKQISTGKLADFLAKDIVLFQPSVNDGENKITGLNYRIMQSAIAVYDSGDDYEAKQQFKLMFEKARLIGKGTTEPHPFLYKVFARSIPANAVEFYERYLIERKFYLTGLSNEIKKGNRVDVPFIRRDQNKWKTPAMKTLGRIYSEDLPVELPRQMFDNEIKSHLKSLPQMEGIDFNNANVTYLIAEYMKRVLDDDFQTFYQWNRNYRYMDMLKGEYDRKGSLQHCFTSVEEREGLWKERASRTERYRKQASNKIRSNRQMRNASSEEIETILDKRLSNSRNEYQKSEKVIRRYRVQDALLFLLAKKTLTELADFDGERFKLKEIMPDAEKGILSEIMPMSFTFEKGGKKYTITSEGMKLKNYGDFFVLASDKRIGNLLELVGSDIVSKEDIMEEFNKYDQCRPEISSIVFNLEKWAFDTYPELSARVDREEKVDFKSILKILLNNKNINKEQSDILRKIRNAFDHNNYPDKGVVEIKALPEIAMSIK

SEQ ID NO: 271 - protein, 1140 aa, Flavobacterium branchiophilum
MENLNKILDKENEICISKIFNTKGIAAPITEKALDNIKSKQKNDLNKEARLHYFSIGHSFKQIDTKKVFDYVLIEELKDEKPLKFITLQKDFFTKEFSIKLQKLINSIRNINNHYVHNFNDINLNKIDSNVFHFLKESFELAIIEKYYKVNKKYPLDNEIVLFLKELFIKDENTALLNYFTNLSKDEAIEYILTFTITENKIWNINNEHNILNIEKGKYLTFEAMLFLITIFLYKNEANHLLPKLYDFKNNKSKQELFTFFSKKFTSQDIDAEEGHLIKFRDMIQYLNHYPTAWNNDLKLESENKNKIMTTKLIDSIIEFELNSNYPSFATDIQFKKEAKAFLFASNKKRNQTSFSNKSYNEEIRHNPHIKQYRDEIASALTPISFNVKEDKFKIFVKKHVLEEYFPNSIGYEKFLEYNDFTEKEKEDFGLKLYSNPKTNKLIERIDNHKLVKSHGRNQDRFMDFSMRFLAENNYFGKDAFFKCYKFYDTQEQDEFLQSNENNDDVKFHKGKVTTYIKYEEHLKNYSYWDCPFVEENNSMSVKISIGSEEKILKIQRNLMIYFLENALYNENVENQGYKLVNNYYRELKKDVEESIASLDLIKSNPDFKSKYKKILPKRLLHNYAPAKQDKAPENAFETLLKKADFREEQYKKLLKKAEHEKNKEDFVKRNKGKQFKLHFIRKACQMMYFKEKYNTLKEGNAAFEKKDPVIEKRKNKEHEFGHHKNLNITREEFNDYCKWMFAFNGNDSYKKYLRDLFSEKHFFDNQEYKNLFESSVNLEAFYAKTKELFKKWIETNKPTNNENRYTLENYKNLILQKQVFINVYHFSKYLIDKNLLNSENNVIQYKSLENVEYLISDFYFQSKLSIDQYKTCGKLFNKLKSNKLEDCLLYEIAYNYIDKKNVHKIDIQKILTSKIILTINDANTPYKISVPFNKLERYTEMIAIKNQNNLKARFLIDLPLYLSKNKIKKGKDSAGYEIIIKNDLEIEDINTINNKIINDSVKFTEVLMELEKYFILKDKCILSKNYIDNSEIPSLKQFSKVWIKENENEIINYRNIACHFHLPLLETFDNLLLNVEQKFIKEELQNVSTINDLSKPQEYLILLFIKFKHNNFYLNLFNKNESKTIKNDKEVKKNRVLQK

SEQ ID NO: 272 - protein, 1080 aa, Porphyromonas gingivalis
MTEQNEKPYNGTYYTLEDKHFWAAFLNLARHNAYITLAHIDRQLAYSKADITNDEDILFFKGQWKNLDNDLERKARLRSLILKHFSFLEGAAYGKKLFESQSSGNKSSKKKELSKKEKEELQANALSLDNLKSILFDFLQKLKDFRNYYSHYRHPESSELPLFDGNMLQRLYNVFDVSVQRVKRDHEHNDKVDPHRHFNHLVRKGKKDKYGNNDNPFFKHHFVDREGTVTEAGLLFFVSLFLEKRDAIWMQKKIRGFKGGTEAYQQMTNEVFCRSRISLPKLKLESLRTDDWMLLDMLNELVRCPKSLYDRLREEDRARFRVPVDILSDEDDTDGTEEDPFKNTLVRHQDRFPYFALRYFDLKKVFTSLRFHIDLGTYHFAIYKKNIGEQPEDRHLTRNLYGFGRIQDFAEEHRPEEWKRLVRDLDYFETGDKPYITQTTPHYHIEKGKIGLRFVPEGQHLWPSPEVGATRTGRSKYAQDKRLTAEAFLSVHELMPMMFYYFLLREKYSEEVSAEKVQGRIKRVIEDVYAVYDAFARDEINTRDELDACLADKGIRRGHLPRQMIAILSQEHKDMEEKVRKKLQEMIADTDHRLDMLDRQTDRKIRIGRKNAGLPKSGVVADWLVRDMMRFQPVAKDTSGKPLNNSKANSTEYRMLQRALALFGGEKERLTPYFRQMNLTGGNNPHPFLHETRWESHTNILSFYRSYLEARKAFLQSIGRSDRVENHRFLLLKEPKTDRQTLVAGWKGEFHLPRGIFTEAVRDCLIEMGYDEVGSYKEVGFMAKAVPLYFERASKDRVQPFYDYPFNVGNSLKPKKGRFLSKEKRAEEWESGKERFRLAKLKKEILEAKEHPYHDFKSWQKFERELRLVKNQDIITWMMCRDLMEENKVEGLDTGTLYLKDIRTDVQEQGSLNVLNRVKPMRLPVVVYRADSRGHVHKEQAPLATVYIEERDTKLLKQGNFKSFVKDRRLNGLFSFVDTGALAMEQYPISKLRVEYELAKYQTARVCAFEQTLELEESLLTRYPHLPDKNFRKMLESWSDPLLDKWPDLHGNVRLLIAVRNAFSHNQYPMYDETLFSSIR

SEQ ID NO: 273 - protein, 1132 aa, Prevotella intermedia; identical to SEQ ID NO: 196

SEQ ID NO: 274 - protein, 1080 aa, Fusobacterium necrophorum
MEKFRRQNRNSIIKIIISNYDTKGIKELKVRYRKQAQLDTFIIKTEIVNNDIFIKSIIEKAREKYRYSFLFDGEEKYHFKNKSSVEIVKKDIFSQTPDNMIRNYKITLKISEKNPRVVEAEIEDLMNSTILKDGRRSARREKSMTERKLIEEKVAKNYSLLANCPMEEVDSIKIYKIKRFLTYRSNMLLYFASINSFLCEGIKGKDNETEEIWHLKDNDVRKEKVRENFKNKLIQSTENYNSSLKNQIEEKEKLLRKEFKKGAFYRTIIKKLQQERIKELSEKSLTEDCEKIIKLYSKLRHSLMHYDYQYFENLFENKKNDDLMKDLNLDLFKSLPLIRKMKLNNKVNYLEDGDTLFVLQKTKKAKTLYQIYDALCEQKNGFNKFINDFFVSDGEENTVFKQIINEKFQSEMEFLEKRISESEKKNEKLKKKLDSMKAHFRNINSEDTKEAYFWDIHSSRNYKTKYNERKNLVNEYTELLGSSKEKKLLREEITKINRQLLKLKQEMEEITKKNSLFRLEYKMKIAFGFLFCEFDGNISKFKDEFDASNQEKIIQYHKNGEKYLTSFLKEEEKEKFNLEKMQKIIQKTEEEDWLLPETKNNLFKFYLLTYLLLPYELKGDFLGFVKKHYYDIKNVDFIDENQNNIQVSQTVEKQEDYFYHKIRLFEKNTKKYEIVKYSIVPNEKLKQYFEDLGIDIKYLTVEQKSEVSEEKNKKVSLKNNGMFNKTILLFVFKYYQIAFKLFNDIELYSLFFLREKSGKPLEIFRKELESKMKDGYLNFGQLLYVVYEVLVKNKDLDKILSKKIDYRKDKSFSPEIAYLRNFLSHLNYSKFLDNFMKINTNKSDENKEVLIPSIKIQKMIQFIEKCNLQNQIDFDFNFVNDFYMRKEKMFFIQLKQIFPDINSTEKQKMNEKEEILRNRYHLTDKKNEQIKDEHEAQSQLYEKILSLQKIYSSDKNNFYGRLKEEKLLFLEKQGKKKLSMEEIKDKIAGDISDLLGILKKEITRDIKDKLTEKFRYCEEKLLNLSFYNHQDKKKEESIRVFLIRDKNSDNFKFESILDDGSNKIFISKNGKEITIQCCDK

SEQ ID NO: 275 - protein, 1080 aa, Fusobacterium necrophorum
MEKFRRQNRSSIIKIIISNYDTKGIKELKVRYRKQAQLDTFIIKTEIVNNDIFIKSIIEKAREKYRYSFLFDGEEKYHFKNKSSVEIVKKDIFSQTPDNMIRNYKITLKISEKNPRVVEAEIEDLMNSTILKDGRRSARREKSMTERKLIEEKVAENYSLLANCPMEEVDSIKIYKIKRFLTYRSNMLLYFASINSFLCEGIKGKDNETEEIWHLKDNDVRKEKVKENFKNKLIQSTENYNSSLKNQIEEKEKLLRKESKKGAFYRTIIKKLQQERIKELSEKSLTEDCEKIIKLYSELRHPLMHYDYQYFENLFENKENSELTKNLNLDIFKSLPLVRKMKLNNKVNYLEDNDTLFVLQKTKKAKTLYQIYDALCEQKNGFNKFINDFFVSDGEENTVFKQIINEKFQSEIEFLEKRISESEKKNEKLKKKLDSMKAHFRNINSEDTKEAYFWDIHSSRNYKTKYNERKNLVNEYTELLGSSKEKKLLREEITKINRQLLKLKQEMEEITKKNSLFRLEYKMKMAFGFLFCEFDGNISRFKDEFDASNQEKIIQYHKNGEKYLTYFLKEEEKEKFNLKKLQETIQKTGEENWLLPQNKNNLFKFYLLTYLLLPYELKGDFLGFVKKHYYDIKNVDFMDENQSSKIIESKEDDFYHKIRLFEKNTKKYEIVKYSIVPDKKLKQYFKDLGIDTKYLILDQKSEVSGEKNKKVSLKNNGMFNKTILLFVFKYYQIAFKLFNDIELYSLFFLREKSGKPFEVFLKELKDKMIGKQLNFGQLLYVVYEVLVKNKDLSEILSERIDYRKDMCFSAEIADLRNFLSHLNYSKFLDNFMKINTNKSDENKEVLIPSIKIQKMIKFIEECNLQSQIDFDFNFVNDFYMRKEKMFFIQLKQIFPDINSTEKQKMNEKEEILRNRYHLTDKKNEQIKDEHEAQSQLYEKILSLQKIYSSDKNNFYGRLKEEKLLFLEKQEKKKLSMEEIKDKIAGDISDLLGILKKEITRDIKDKLTEKFRYCEEKLLNLSFYNHQDKKKEESIRVFLIRDKNSDNFKFESILDDGSNKIFISKNGKEITIQCCDKVLET

SEQ ID NO: 276 - protein, 1080 aa, Fusobacterium necrophorum
MKVRYRKQAQLDTFIIKTEIVNNDIFIKSIIEKAREKYRYSFLFDGEEKYHFKNKSSVEIVKNDIFSQTPDNMIRNYKITLKISEKNPRVVEAEIEDLMNSTILKDGRRSARREKSMTERKLIEEKVAENYSLLANCPIEEVDSIKIYKIKRFLTYRSNMLLYFASINSFLCEGIKGKDNETEEIWHLKDNDVRKEKVKENFKNKLIQSTENYNSSLKNQIEEKEKLSSKEFKKGAFYRTIIKKLQQERIKELSEKSLTEDCEKIIKLYSELRHPLMHYDYQYFENLFENKENSELTKNLNLDIFKSLPLVRKMKLNNKVNYLEDNDTLFVLQKTKKAKTLYQIYDALCEQKNGFNKFINDFFVSDGEENTVFKQIINEKFQSEMEFLEKRISESEKKNEKLKKKLDSMKAHFRNINSEDTKEAYFWDIHSSRNYKTKYNERKNLVNEYTKLLGSSKEKKLLREEITKINRQLLKLKQEMEEITKKNSLFRLEYKMKIAFGFLFCEFDGNISKFKDEFDASNQEKIIQYHKNGEKYLTSFLKEEEKEKFNLEKMQKIIQKTEEEDWLLPETKNNLFKFYLLTYLLLPYELKGDFLGFVKKHYYDIKNVDFMDENQNNIQVSQTVEKQEDYFYHKIRLFEKNTKKYEIVKYSIVPNEKLKQYFEDLGIDIKYLTGSVESGEKWLGENLGIDIKYLTVEQKSEVSEEKNKKVSLKNNGMFNKTILLFVFKYYQIAFKLFNDIELYSLFFLREKSEKPFEVFLEELKDKMIGKQLNFGQLLYVVYEVLVKNKDLDKILSKKIDYRKDKSFSPEIAYLRNFLSHLNYSKFLDNFMKINTNKSDENKEVLIPSIKIQKMIQFIEKCNLQNQIDFDFNFVNDFYMRKEKMFFIQLKQIFPDINSTEKQKKSEKEEILRKRYHLINKKNEQIKDEHEAQSQLYEKILSLQKIFSCDKNNFYRRLKEEKLLFLEKQGKKKISMKEIKDKIASDISDLLGILKKEITRDIKDKLTEKFRYCEEKLLNISFYNHQDKKKEEGIRVFLIRDKNSDNFKFESILDDGSNKIFISKNGKEITIQCCDKVLETL

SEQ ID NO: 277 - protein, 660 aa, Fusobacterium necrophorum
MTEKKSIIFKNKSSVEIVKKDIFSQTPDNMIRNYKITLKISEKNPRVVEAEIEDLMNSTILKDGRRSARREKSMTERKLIEEKVAENYSLLANCPMEEVDSIKIYKIKRFLTYRSNMLLYFASINSFLCEGIKGKDNETEEIWHLKDNDVRKEKVKENFKNKLIQSTENYNSSLKNQIEEKEKLLRKESKKGAFYRTIIKKLQQERIKELSEKSLTEDCEKIIKLYSELRHPLMHYDYQYFENLFENKENSELTKNLNLDIFKSLPLVRKMKLNNKVNYLEDNDTLFVLQKTKKAKTLYQIYDALCEQKNGFNKFINDFFVSDGEENTVFKQIINEKFQSEMEFLEKRISESEKKNEKLKKKFDSMKAHFHNINSEDTKEAYFWDIHSSSNYKTKYNERKNLVNEYTELLGSSKEKKLLREEITQINRKLLKLKQEMEEITKKNSLFRLEYKMKIAFGFLFCEFDGNISKFKDEFDASNQEKIIQYHKNGEKYLTYFLKEEEKEKFNLEKMQKIIQKTEEEDWLLPETKNNLFKFYLLTYLLLPYELKGDFLGFVKKHYYDIKNVDFMDENQNNIQVSQTVEKQEDYFYHKIRLFEKNTKKYEIVKYSIVPNEKLKQYFEDLGIDIKYLTGSVESGEKWLGENLGIDIKYLTVEQKSEVS

SEQ ID NO: 278 - protein, 1080 aa, Fusobacterium perfoetens
MGKPNRSSIIKIIISNYDNKGIKEVKVRYNKQAQLDTFLIKSELKDGKFILYSIVDKAREKYRYSFEIDKTNINKNEILIIKKDIYSNKEDKVIRKYILSFEVSEKNDRTIVTKIKDCLETQKKEKFERENTRRLISETERKLLSEETQKTYSKIACCSPEDIDSVKIYKIKRYLAYRSNMLLFFSLINDIFVKGVVKDNGEEVGEIWRIIDSKEIDEKKTYDLLVENFKKRMSQEFINYKQSIENKIEKNTNKIKEIEQKLKKEKYKKEINRLKKQLIELNRENDLLEKDKIELSDEEIREDIEKILKIYSDLRHKLMHYNYQYFENLFENKKISKEKNEDVNLTELLDLNLFRYLPLVRQLKLENKTNYLEKEDKITVLGVSDSAIKYYSYYNFLCEQKNGFNNFINSFFSNDGEENKSFKEKINLSLEKEIEIMEKETNEKIKEINKNELQLMKEQKELGTAYVLDIHSLNDYKISHNERNKNVKLQNDIMNGNRDKNALDKINKKLVELKIKMDKITKRNSILRLKYKLQVAYGFLMEEYKGNIKKFKDEFDISKEKIKSYKSKGEKYLEVKSEKKYITKILNSIEDIHNITWLKNQEENNLFKFYVLTYILLPFEFRGDFLGFVKKHYYDIKNVEFLDENNDRLTPEQLEKMKNDSFFNKIRLFEKNSKKYDILKESILTSERIGKYFSLLNTGAKYFEYGGEENRGIFNKNIIIPIFKYYQIVLKLYNDVELAMLLTLSESDEKDINKIKELVTLKEKVSPKKIDYEKKYKFSVLLDCFNRIINLGKKDFLASEEVKEVAKTFTNLAYLRNKICHLNYSKFIDDLLTIDTNKSTTDSEGKLLINDRIRKLIKFIRENNQKMNISIDYNYINDYYMKKEKFIFGQRKQAKTIIDSGKKANKRNKAEELLKMYRVKKENINLIYELSKKLNELTKSELFLLDKKLLKDIDFTDVKIKNKSFFELKNDVKEVANIKQALQKHSSELIGIYKKEVIMAIKRSIVSKLIYDEEKVLSIIIYDKTNKKYEDFLLEIRRERDINKFQFLIDEKKEKLGYEKIIETKEKKKVVVKIQNNSEL

SEQ ID NO: 279 - protein, 897 aa, Fusobacterium ulcerans
MENKGNNKKIDFDENYNILVAQIKEYFTKEIENYNNRIDNIIDKKELLKYSEKKEESEKNKKLEELNKLKSQKLKILTDEEIKADVIKIIKIFSDLRHSLMHYEYKYFENLFENKKNEELAELLNLNLFKNLTLLRQMKIENKTNYLEGREEFNIIGKNIKAKEVLGHYNLLAEQKNGFNNFINSFFVQDGTENLEFKKLIDEHFVNAKKRLERNIKKSKKLEKELEKMEQHYQRLNCAYVWDIHTSTTYKKLYNKRKSLIEEYNKQINEIKDKEVITAINVELLRIKKEMEEITKSNSLFRLKYKMQIAYAFLEIEFGGNIAKFKDEFDCSKMEEVQKYLKKGVKYLKYYKDKEAQKNYEFPFEEIFENKDTHNEEWLENTSENNLFKFYILTYLLLPMEFKGDFLGVVKKHYYDIKNVDFTDESEKELSQVQLDKMIGDSFFHKIRLFEKNTKRYEIIKYSILTSDEIKRYFRLLELDVPYFEYEKGTDEIGIFNKNIILTIFKYYQIIFRLYNDLEIHGLFNISSDLDKILRDLKSYGNKNINFREFLYVIKQNNNSSTEEEYRKIWENLEAKYLRLHLLTPEKEEIKTKTKEELEKLNEISNLRNGICHLNYKEIIEEILKTEISEKNKEATLNEKIRKVINFIKENELDKVELGFNFINDFFMKKEQFMFGQIKQVKEGNSDSITTERERKEKNNKKLKETYELNCDNLSEFYETSNNLRERANSSSLLEDSAFLKKIGLYKVKNNKVNSKVKDEEKRIENIKRKLLKDSSDIMGMYKAEVVKKLKEKLILIFKHDEEKRIYVTVYDTSKAVPENISKEILVKRNNSKEEYFFEDNNKKYVTEYYTLEITETNELKVIPAKKLEGKEFKTEKNKENKLMLNNHYCFNVKIIY

SEQ ID NO: 280 - protein, 1080 aa, Anaerosalibacter species
MKSGRREKAKSNKSSIVRVIISNFDDKQVKEIKVLYTKQGGIDVIKFKSTEKDEKGRMKFNFDCAYNRLEEEEFNSFGGKGKQSFFVTTNEDLTELHVTKRHKTTGEIIKDYTIQGKYTPIKQDRTKVTVSITDNKDHFDSNDLGDKIRLSRSLTQYTNRILLDADVMKNYREIVCSDSEKVDETINIDSQEIYKINRFLSYRSNMIIYYQMINNFLLHYDGEEDKGGNDSINLINEIWKYENKKNDEKEKIIERSYKSIEKSINQYILNHNTEVESGDKEKKIDISEERIKEDLKKTFILFSRLRHYMVHYNYKFYENLYSGKNFIIYNKDKSKSRRFSELLDLNIFKELSKIKLVKNRAVSNYLDKKTTIHVLNKNINAIKLLDIYRDICETKNGFNNFINNMMTISGEEDKEYKEMVTKHFNENMNKLSIYLENFKKHSDFKTNNKKKETYNLLKQELDEQKKLRLWFNAPYVYDIHSSKKYKELYVERKKYVDIHSKLIEAGINNDNKKKLNEINVKLCELNTEMKEMTKLNSKYRLQYKLQLAFGFILEEFNLDIDKFVSAFDKDNNLTISKFMEKRETYLSKSLDRRDNRFKKLIKDYKFRDTEDIFCSDRENNLVKLYILMYILLPVEIRGDFLGFVKKNYYDLKHVDFIDKRNNDNKDTFFHDLRLFEKNVKRLEVTSYSLSDGFLGKKSREKFGKELEKFIYKNVSIALPTNIDIKEFNKSLVLPMMKNYQIIFKLLNDIEISALFLIAKKEGNEGSITFKKVIDKVRKEDMNGNINFSQVMKMALNEKVNCQIRNSIAHINMKQLYIEPLNIYINNNQNKKTISEQMEEIIDICITKGLTGKELNKNIINDYYMKKEKLVFNLKLRKRNNLVSIDAQQKNMKEKSILNKYDLNYKDENLNIKEIILKVNDLNNKQKLLKETTEGESNYKNALSKDILLLNGIIRKNINFKIKEMILGIIQQNEYRYVNINIYDKIRKEDHNIDLKINNKYIEISCYENKSNESTDERINFKIKYMDLKVKNELLVPSCYEDIYIKKKIDLEIRYIENCKVVYIDIYYKKYNINLEFDGKT

SEQ ID NO: 281 - protein, 1345 aa, Franscisella tularensis
MSIYQEFVNKYSLSKTLRFELIPQGKTLENIKARGLILDDEKRAKDYKKAKQIIDKYHQFFIEEILSSVCISEDLLQNYSDVYFKLKKSDDDNLQKDFKSAKDTIKKQISEYIKDSEKFKNLFNQNLIDAKKGQESDLILWLKQSKDNGIELFKANSDITDIDEALEIIKSFKGWTTYFKGFHENRKNVYSSNDIPTSIIYRIVDDNLPKFLENKAKYESLKDKAPEAINYEQIKKDLAEELTFDIDYKTSEVNQRVFSLDEVFEIANFNNYLNQSGITKFNTIIGGKFVNGENTKRKGINEYINLYSQQINDKTLKKYKMSVLFKQILSDTESKSFVIDKLEDDSDVVTTMQSFYEQIAAFKTVEEKSIKETLSLLFDDLKAQKLDLSKIYFKNDKSLTDLSQQVFDDYSVIGTAVLEYITQQIAPKNLDNPSKKEQELIAKKTEKAKYLSLETIKLALEEFNKHRDIDKQCRFEEILANFAAIPMIFDEIAQNKDNLAQISIKYQNQGKKDLLQASAEDDVKAIKDLLDQTNNLLHKLKIFHISQSEDKANILDKDEHFYLVFEECYFELANIVPLYNKIRNYITQKPYSDEKFKLNFENSTLANGWDKNKEPDNTAILFIKDDKYYLGVMNKKNNKIFDDKAIKENKGEGYKKIVYKLLPGANKMLPKVFFSAKSIKFYNPSEDILRIRNHSTHTKNGSPQKGYEKFEFNIEDCRKFIDFYKQSISKHPEWKDFGFRFSDTQRYNSIDEFYREVENQGYKLTFENISESYIDSVVNQGKLYLFQIYNKDFSAYSKGRPNLHTLYWKALFDERNLQDVVYKLNGEAELFYRKQSIPKKITHPAKEAIANKNKDNPKKESVFEYDLIKDKRFTEDKFFFHCPITINFKSSGANKFNDEINLLLKEKANDVHILSIDRGERHLAYYTLVDGKGNIIKQDTFNIIGNDRMKTNYHDKLAAIEKDRDSARKDWKKINNIKEMKEGYLSQVVHEIAKLVIEYNAIVVFEDLNFGFKRGRFKVEKQVYQKLEKMLIEKLNYLVFKDNEFDKTGGVLRAYQLTAPFETFKKMGKQTGIIYYVPAGFTSKICPVTGFVNQLYPKYESVSKSQEFFSKFDKICYNLDKGYFEFSFDYKNFGDKAAKGKWTIASFGSRLINFRNSDKNHNWDTREVYPTKELEKLLKDYSIEYGHGECIKAAICGESDKKFFAKLTSVLNTILQMRNSKTGTELDYLISPVADVNGNFFDSRQAPKNMPQDADANGAYHIGLKGLMLLGRIKNNQEGKKLNLVIKNEEYFEFVQNRNNKRPAATKKAGQAKKKKGSYPYDVPDYAYPYDVPDYAYPYDVPDYA

SEQ ID NO: 282 - protein, 1278 aa, Lachnospiraceae bacterium
MDYGNGQFERRAPLTKTITLRLKPIGETRETIREQKLLEQDAAFRKLVETVTPIVDDCIRKIADNALCHFGTEYDFSCLGNAISKNDSKAIKKETEKVEKLLAKVLTENLPDGLRKVNDINSAAFIQDTLTSFVQDDADKRVLIQELKGKTVLMQRFLTTRITALTVWLPDRVFENFNIFIENAEKMRILLDSPLNEKIMKFDPDAEQYASLEFYGQCLSQKDIDSYNLIISGIYADDEVKNPGINEIVKEYNQQIRGDKDESPLPKLKKLHKQILMPVEKAFFVRVLSNDSDARSILEKILKDTEMLPSKIIEAMKEADAGDIAVYGSRLHELSHVIYGDHGKLSQIIYDKESKRISELMETLSPKERKESKKRLEGLEEHIRKSTYTFDELNRYAEKNVMAAYIAAVEESCAEIMRKEKDLRTLLSKEDVKIRGNRHNTLIVKNYFNAWTVFRNLIRILRRKSEAEIDSDFYDVLDDSVEVLSLTYKGENLCRSYITKKIGSDLKPEIATYGSALRPNSRWWSPGEKFNVKFHTIVRRDGRLYYFILPKGAKPVELEDMDGDIECLQMRKIPNPTIFLPKLVFKDPEAFFRDNPEADEFVFLSGMKAPVTITRETYEAYRYKLYTVGKLRDGEVSEEEYKRALLQVLTAYKEFLENRMIYADLNFGFKDLEEYKDSSEFIKQVETHNTFMCWAKVSSSQLDDLVKSGNGLLFEIWSERLESYYKYGNEKVLRGYEGVLLSILKDENLVSMRTLLNSRPMLVYRPKESSKPMVVHRDGSRVVDRFDKDGKYIPPEVHDELYRFFNNLLIKEKLGEKARKILDNKKVKVKVLESERVKWSKFYDEQFAVTFSVKKNADCLDTTKDLNAEVMEQYSESNRLILIRNTTDILYYLVLDKNGKVLKQRSLNIINDGARDVDWKERFRQVTKDRNEGYNEWDYSRTSNDLKEVYLNYALKEIAEAVIEYNAILIIEKMSNAFKDKYSFLDDVTFKGFETKLLAKLSDLHFRGIKDGEPCSFTNPLQLCQNDSNKILQDGVIFMVPNSMTRSLDPDTGFIFAINDHNIRTKKAKLNFLSKFDQLKVSSEGCLIMKYSGDSLPTHNTDNRVWNCCCNHPITNYDRETKKVEFIEEPVEELSRVLEENGIETDTELNKLNERENVPGKVVDAIYSLVLNYLRGTVSGVAGQRAVYYSPVTGKKYDISFIQAMNLNRKCDYYRIGSKERGEWTDFVAQLINKRPAATKKAGQAKKKKGSYPYDVPDYAYPYDVPDYAYPYDVPDYA

SEQ ID NO: 283 - protein, 1286 aa, Butyrivibrio proteoclasticus
MLLYENYTKRNQITKSLRLELRPQGKTLRNIKELNLLEQDKAIYALLERLKPVIDEGIKDIARDTLKNCELSFEKLYEHFLSGDKKAYAKESERLKKEIVKTLIKNLPEGIGKISEINSAKYLNGVLYDFIDKTHKDSEEKQNILSDILETKGYLALFSKFLTSRITTLEQSMPKRVIENFEIYAANIPKMQDALERGAVSFAIEYESICSVDYYNQILSQEDIDSYNRLISGIMDEDGAKEKGINQTISEKNIKIKSEHLEEKPFRILKQLHKQILEEREKAFTIDHIDSDEEVVQVTKEAFEQTKEQWENIKKINGFYAKDPGDITLFIVVGPNQTHVLSQLIYGEHDRIRLLLEEYEKNTLEVLPRRTKSEKARYDKFVNAVPKKVAKESHTFDGLQKMTGDDRLFILYRDELARNYMRIKEAYGTFERDILKSRRGIKGNRDVQESLVSFYDELTKFRSALRIINSGNDEKADPIFYNTFDGIFEKANRTYKAENLCRNYVTKSPADDARIMASCLGTPARLRTHWWNGEENFAINDVAMIRRGDEYYYFVLTPDVKPVDLKTKDETDAQIFVQRKGAKSFLGLPKALFKCILEPYFESPEHKNDKNCVIEEYVSKPLTIDRRAYDIFKNGTFKKTNIGIDGLTEEKFKDDCRYLIDVYKEFIAVYTRYSCFNMSGLKRADEYNDIGEFFSDVDTRLCTMEWIPVSFERINDMVDKKEGLLFLVRSMFLYNRPRKPYERTFIQLFSDSNMEHTSMLLNSRAMIQYRAASLPRRVTHKKGSILVALRDSNGEHIPMHIREAIYKMKNNFDISSEDFIMAKAYLAEHDVAIKKANEDIIRNRRYTEDKFFLSLSYTKNADISARTLDYINDKVEEDTQDSRMAVIVTRNLKDLTYVAVVDEKNNVLEEKSLNEIDGVNYRELLKERTKIKYHDKTRLWQYDVSSKGLKEAYVELAVTQISKLATKYNAVVVVESMSSTFKDKFSFLDEQIFKAFEARLCARMSDLSFNTIKEGEAGSISNPIQVSNNNGNSYQDGVIYFLNNAYTRTLCPDTGFVDVFDKTRLITMQSKRQFFAKMKDIRIDDGEMLFTFNLEEYPTKRLLDRKEWTVKIAGDGSYFDKDKGEYVYVNDIVREQIIPALLEDKAVFDGNMAEKFLDKTAISGKSVELIYKWFANALYGIITKKDGEKIYRSPITGTEIDVSKNTTYNFGKKFMFKQEYRGDGDFLDAFLNYMQAQDIAVKRPAATKKAGQAKKKKGSYPYDVPDYAYPYDVPDYAYPYDVPDYA

SEQ ID NO: 284 - protein, 1522 aa, Peregrinibacteria bacterium
MSNFFKNFTNLYELSKTLRFELKPVGDTLTNMKDHLEYDEKLQTFLKDQNIDDAYQALKPQFDEIHEEFITDSLESKKAKEIDFSEYLDLFQEKKELNDSEKKLRNKIGETFNKAGEKWKKEKYPQYEWKKGSKIANGADILSCQDMLQFIKYKNPEDEKIKNYIDDTLKGFFTYFGGFNQNRANYYETKKEASTAVATRIVHENLPKFCDNVIQFKHIIKRKKDGTVEKTERKTEYLNAYQYLKNNNKITQIKDAETEKMIESTPIAEKIFDVYYFSSCLSQKQIEEYNRIIGHYNLLINLYNQAKRSEGKHLSANEKKYKDLPKFKTLYKQIGCGKKKDLFYTIKCDTEEEANKSRNEGKESHSVEEIINKAQEAINKYFKSNNDCENINTVPDFINYILTKENYEGVYWSKAAMNTISDKYFANYHDLQDRLKEAKVFQKADKKSEDDIKIPEAIELSGLFGVLDSLADWQTTLFKSSILSNEDKLKIITDSQTPSEALLKMIFNDIEKNMESFLKETNDIITLKKYKGNKEGTEKIKQWFDYTLAINRMLKYFLVKENKIKGNSLDTNISEALKTLIYSDDAEWFKWYDALRNYLTQKPQDEAKENKLKLNFDNPSLAGGWDVNKECSNFCVILKDKNEKKYLAIMKKGENTLFQKEWTEGRGKNLTKKSNPLFEINNCEILSKMEYDFWADVSKMIPKCSTQLKAVVNHFKQSDNEFIFPIGYKVTSGEKFREECKISKQDFELNNKVFNKNELSVTAMRYDLSSTQEKQYIKAFQKEYWELLFKQEKRDTKLTNNEIFNEWINFCNKKYSELLSWERKYKDALTNWINFCKYFLSKYPKTTLFNYSFKESENYNSLDEFYRDVDICSYKLNINTTINKSILDRLVEEGKLYLFEIKNQDSNDGKSIGHKNNLHTIYWNAIFENFDNRPKLNGEAEIFYRKAISKDKLGIVKGKKTKNGTEIIKNYRFSKEKFILHVPITLNFCSNNEYVNDIVNTKFYNFSNLHFLGIDRGEKHLAYYSLVNKNGEIVDQGTLNLPFTDKDGNQRSIKKEKYFYNKQEDKWEAKEVDCWNYNDLLDAMASNRDMARKNWQRIGTIKEAKNGYVSLVIRKIADLAVNNERPAFIVLEDLNTGFKRSRQKIDKSVYQKFELALAKKLNFLVDKNAKRDEIGSPTKALQLTPPVNNYGDIENKKQAGIMLYTRANYTSQTDPATGWRKTIYLKAGPEETTYKKDGKIKNKSVKDQIIETFTDIGFDGKDYYFEYDKGEFVDEKTGEIKPKKWRLYSGENGKSLDRFRGEREKDKYEWKIDKIDIVKILDDLFVNFDKNISLLKQLKEGVELTRNNEHGTGESLRFAINLIQQIRNTGNNERDNDFILSPVRDENGKHFDSREYWDKETKGEKISMPSSGDANGAFNIARKGIIMNAHILANSDSKDLSLFVSDEEWDLHLNNKTEWKKQLNIFSSRKAMAKRKKKRPAATKKAGQAKKKKGSYPYDVPDYAYPYDVPDYAYPYDVPDYA

SEQ ID NO: 285 - protein, 1397 aa, Parcubacteria bacterium
MENIFDQFIGKYSLSKTLRFELKPVGKTEDFLKINKVFEKDQTIDDSYNQAKFYFDSLHQKFIDAALASDKTSELSFQNFADVLEKQNKIILDKKREMGALRKRDKNAVGIDRLQKEINDAEDIIQKEKEKIYKDVRTLFDNEAESWKTYYQEREVDGKKITFSKADLKQKGADFLTAAGILKVLKYEFPEEKEKEFQAKNQPSLFVEEKENPGQKRYIFDSFDKFAGYLTKFQQTKKNLYAADGTSTAVATRIADNFIIFHQNTKVFRDKYKNNHTDLGFDEENIFEIERYKNCLLQREIEHIKNENSYNKIIGRINKKIKEYRDQKAKDTKLTKSDFPFFKNLDKQILGEVEKEKQLIEKTREKTEEDVLIERFKEFIENNEERFTAAKKLMNAFCNGEFESEYEGIYLKNKAINTISRRWFVSDRDFELKLPQQKSKNKSEKNEPKVKKFISIAEIKNAVEELDGDIFKAVFYDKKIIAQGGSKLEQFLVIWKYEFEYLFRDIERENGEKLLGYDSCLKIAKQLGIFPQEKEAREKATAVIKNYADAGLGIFQMMKYFSLDDKDRKNTPGQLSTNFYAEYDGYYKDFEFIKYYNEFRNFITKKPFDEDKIKLNFENGALLKGWDENKEYDFMGVILKKEGRLYLGIMHKNHRKLFQSMGNAKGDNANRYQKMIYKQIADASKDVPRLLLTSKKAMEKFKPSQEILRIKKEKTFKRESKNFSLRDLHALIEYYRNCIPQYSNWSFYDFQFQDTGKYQNIKEFTDDVQKYGYKISFRDIDDEYINQALNEGKMYLFEVVNKDIYNTKNGSKNLHTLYFEHILSAENLNDPVFKLSGMAEIFQRQPSVNEREKITTQKNQCILDKGDRAYKYRRYTEKKIMFHMSLVLNTGKGEIKQVQFNKIINQRISSSDNEMRVNVIGIDRGEKNLLYYSVVKQNGEIIEQASLNEINGVNYRDKLIEREKERLKNRQSWKPVVKIKDLKKGYISHVIHKICQLIEKYSAIVVLEDLNMRFKQIRGGIERSVYQQFEKALIDKLGYLVFKDNRDLRAPGGVLNGYQLSAPFVSFEKMRKQTGILFYTQAEYTSKTDPITGFRKNVYISNSASLDKIKEAVKKFDAIGWDGKEQSYFFKYNPYNLADEKYKNSTVSKEWAIFASAPRIRRQKGEDGYWKYDRVKVNEEFEKLLKVWNFVNPKATDIKQEIIKKEKAGDLQGEKELDGRLRNFWHSFIYLFNLVLELRNSFSLQIKIKAGEVIAVDEGVDFIASPVKPFFTTPNPYIPSNLCWLAVENADANGAYNIARKGVMILKKIREHAKKDPEFKKLPNLFISNAEWDEAARDWGKYAGTTALNLDHKRPAATKKAGQAKKKKGSYPYDVPDYAYPYDVPDYAYPYDVPDYA

SEQ ID NO: 286 - protein, 1295 aa, Smithella species
MQTLFENFTNQYPVSKTLRFELIPQGKTKDFIEQKGLLKKDEDRAEKYKKVKNIIDEYHKDFIEKSLNGLKLDGLEKYKTLYLKQEKDDKDKKAFDKEKENLRKQIANAFRNNEKFKTLFAKELIKNDLMSFACEEDKKNVKEFEAFTTYFTGFHQNRANMYVADEKRTAIASRLIHENLPKFIDNIKIFEKMKKEAPELLSPFNQTLKDMKDVIKGTTLEEIFSLDYFNKTLTQSGIDIYNSVIGGRTPEEGKTKIKGLNEYINTDFNQKQTDKKKRQPKFKQLYKQILSDRQSLSFIAEAFKNDTEILEAIEKFYVNELLHFSNEGKSTNVLDAIKNAVSNLESFNLTKMYFRSGASLTDVSRKVFGEWSIINRALDNYYATTYPIKPREKSEKYEERKEKWLKQDFNVSLIQTAIDEYDNETVKGKNSGKVIADYFAKFCDDKETDLIQKVNEGYIAVKDLLNTPCPENEKLGSNKDQVKQIKAFMDSIMDIMHFVRPLSLKDTDKEKDETFYSLFTPLYDHLTQTIALYNKVRNYLTQKPYSTEKIKLNFENSTLLGGWDLNKETDNTAIILRKDNLYYLGIMDKRHNRIFRNVPKADKKDFCYEKMVYKLLPGANKMLPKVFFSQSRIQEFTPSAKLLENYANETHKKGDNFNLNHCHKLIDFFKDSINKHEDWKNFDFRFSATSTYADLSGFYHEVEHQGYKISFQSVADSFIDDLVNEGKLYLFQIYNKDFSPFSKGKPNLHTLYWKMLFDENNLKDVVYKLNGEAEVFYRKKSIAEKNTTIHKANESIINKNPDNPKATSTFNYDIVKDKRYTIDKFQFHIPITMNFKAEGIFNMNQRVNQFLKANPDINIIGIDRGERHLLYYALINQKGKILKQDTLNVIANEKQKVDYHNLLDKKEGDRATARQEWGVIETIKELKEGYLSQVIHKLTDLMIENNAIIVMEDLNFGFKRGRQKVEKQVYQKFEKMLIDKLNYLVDKNKKANELGGLLNAFQLANKFESFQKMGKQNGFIFYVPAWNTSKTDPATGFIDFLKPRYENLNQAKDFFEKFDSIRLNSKADYFEFAFDFKNFTEKADGGRTKWTVCTTNEDRYAWNRALNNNRGSQEKYDITAELKSLFDGKVDYKSGKDLKQQIASQESADFFKALMKNLSITLSLRHNNGEKGDNEQDYILSPVADSKGRFFDSRKADDDMPKNADANGAYHIALKGLWCLEQISKTDDLKKVKLAISNKEWLEFVQTLKGKRPAATKKAGQAKKKKGSYPYDVPDYAYPYDVPDYAYPYDVPDYA

SEQ ID NO: 287 - protein, 1352 aa, Acidaminococcus species
MTQFEGFTNLYQVSKTLRFELIPQGKTLKHIQEQGFIEEDKARNDHYKELKPIIDRIYKTYADQCLQLVQLDWENLSAAIDSYRKEKTEETRNALIEEQATYRNAIHDYFIGRTDNLTDAINKRHAEIYKGLFKAELFNGKVLKQLGTVTTTEHENALLRSFDKFTTYFSGFYENRKNVFSAEDISTAIPHRIVQDNFPKFKENCHIFTRLITAVPSLREHFENVKKAIGIFVSTSIEEVFSFPFYNQLLTQTQIDLYNQLLGGISREAGTEKIKGLNEVLNLAIQKNDETAHIIASLPHRFIPLFKQILSDRNTLSFILEEFKSDEEVIQSFCKYKTLLRNENVLETAEALFNELNSIDLTHIFISHKKLETISSALCDHWDTLRNALYERRISELTGKITKSAKEKVQRSLKHEDINLQEIISAAGKELSEAFKQKTSEILSHAHAALDQPLPTTLKKQEEKEILKSQLDSLLGLYHLLDWFAVDESNEVDPEFSARLTGIKLEMEPSLSFYNKARNYATKKPYSVEKFKLNFQMPTLASGWDVNKEKNNGAILFVKNGLYYLGIMPKQKGRYKALSFEPTEKTSEGFDKMYYDYFPDAAKMIPKCSTQLKAVTAHFQTHTTPILLSNNFIEPLEITKEIYDLNNPEKEPKKFQTAYAKKTGDQKGYREALCKWIDFTRDFLSKYTKTTSIDLSSLRPSSQYKDLGEYYAELNPLLYHISFQRIAEKEIMDAVETGKLYLFQIYNKDFAKGHHGKPNLHTLYWTGLFSPENLAKTSIKLNGQAELFYRPKSRMKRMAHRLGEKMLNKKLKDQKTPIPDTLYQELYDYVNHRLSHDLSDEARALLPNVITKEVSHEIIKDRRFTSDKFFFHVPITLNYQAANSPSKFNQRVNAYLKEHPETPIIGIDRGERNLIYITVIDSTGKILEQRSLNTIQQFDYQKKLDNREKERVAARQAWSVVGTIKDLKQGYLSQVIHEIVDLMIHYQAVVVLENLNFGFKSKRTGIAEKAVYQQFEKMLIDKLNCLVLKDYPAEKVGGVLNPYQLTDQFTSFAKMGTQSGFLFYVPAPYTSKIDPLTGFVDPFVWKTIKNHESRKHFLEGFDFLHYDVKTGDFILHFKMNRNLSFQRGLPGFMPAWDIVFEKNETQFDAKGTPFIAGKRIVPVIENHRFTGRYRDLYPANELIALLEEKGIVFRDGSNILPKLLENDDSHAIDTMVALIRSVLQMRNSNAATGEDYINSPVRDLNGVCFDSRFQNPEWPMDADANGAYHIALKGQLLLNHLKESKDLKLQNGISNQDWLAYIQELRNKRPAATKKAGQAKKKKGSYPYDVPDYAYPYDVPDYAYPYDVPDYA

SEQ ID NO: 288 - protein, 1251 aa, Lachnospiraceae bacterium
MYYESLTKQYPVSKTIRNELIPIGKTLDNIRQNNILESDVKRKQNYEHVKGILDEYHKQLINEALDNCTLPSLKIAAEIYLKNQKEVSDREDFNKTQDLLRKEVVEKLKAHENFTKIGKKDILDLLEKLPSISEDDYNALESFRNFYTYFTSYNKVRENLYSDKEKSSTVAYRLINENFPKFLDNVKSYRFVKTAGILADGLGEEEQDSLFIVETFNKTLTQDGIDTYNSQVGKINSSINLYNQKNQKANGFRKIPKMKMLYKQILSDREESFIDEFQSDEVLIDNVESYGSVLIESLKSSKVSAFFDALRESKGKNVYVKNDLAKTAMSNIVFENWRTFDDLLNQEYDLANENKKKDDKYFEKRQKELKKNKSYSLEHLCNLSEDSCNLIENYIHQISDDIENIIINNETFLRIVINEHDRSRKLAKNRKAVKAIKDFLDSIKVLERELKLINSSGQELEKDLIVYSAHEELLVELKQVDSLYNMTRNYLTKKPFSTEKVKLNFNRSTLLNGWDRNKETDNLGVLLLKDGKYYLGIMNTSANKAFVNPPVAKTEKVFKKVDYKLLPVPNQMLPKVFFAKSNIDFYNPSSEIYSNYKKGTHKKGNMFSLEDCHNLIDFFKESISKHEDWSKFGFKFSDTASYNDISEFYREVEKQGYKLTYTDIDETYINDLIERNELYLFQIYNKDFSMYSKGKLNLHTLYFMMLFDQRNIDDVVYKLNGEAEVFYRPASISEDELIIHKAGEEIKNKNPNRARTKETSTFSYDIVKDKRYSKDKFTLHIPITMNFGVDEVKRFNDAVNSAIRIDENVNVIGIDRGERNLLYVVVIDSKGNILEQISLNSIINKEYDIETDYHALLDEREGGRDKARKDWNTVENIRDLKAGYLSQVVNVVAKLVLKYNAIICLEDLNFGFKRGRQKVEKQVYQKFEKMLIDKLNYLVIDKSREQTSPKELGGALNALQLTSKFKSFKELGKQSGVIYYVPAYLTSKIDPTTGFANLFYMKCENVEKSKRFFDGFDFIRFNALENVFEFGFDYRSFTQRACGINSKWTVCTNGERIIKYRNPDKNNMFDEKVVVVTDEMKNLFEQYKIPYEDGRNVKDMIISNEEAEFYRRLYRLLQQTLQMRNSTSDGTRDYIISPVKNKREAYFNSELSDGSVPKDADANGAYNIARKGLWVLEQIRQKSEGEKINLAMTNAEWLEYAQTHLLKRPAATKKAGQAKKKKGSYPYDVPDYAYPYDVPDYAYPYDVPDYA

SEQ ID NO: 289 - protein, 1283 aa, Candidatus Methanoplasma termitum
MNNYDEFTKLYPIQKTIRFELKPQGRTMEHLETFNFFEEDRDRAEKYKILKEAIDEYHKKFIDEHLTNMSLDWNSLKQISEKYYKSREEKDKKVFLSEQKRMRQEIVSEFKKDDRFKDLFSKKLFSELLKEEIYKKGNHQEIDALKSFDKFSGYFIGLHENRKNMYSDGDEITAISNRIVNENFPKFLDNLQKYQEARKKYPEWIIKAESALVAHNIKMDEVFSLEYFNKVLNQEGIQRYNLALGGYVTKSGEKMMGLNDALNLAHQSEKSSKGRIHMTPLFKQILSEKESFSYIPDVFTEDSQLLPSIGGFFAQIENDKDGNIFDRALELISSYAEYDTERIYIRQADINRVSNVIFGEWGTLGGLMREYKADSINDINLERTCKKVDKWLDSKEFALSDVLEAIKRTGNNDAFNEYISKMRTAREKIDAARKEMKFISEKISGDEESIHIIKTLLDSVQQFLHFFNLFKARQDIPLDGAFYAEFDEVHSKLFAIVPLYNKVRNYLTKNNLNTKKIKLNFKNPTLANGWDQNKVYDYASLIFLRDGNYYLGIINPKRKKNIKFEQGSGNGPFYRKMVYKQIPGPNKNLPRVFLTSTKGKKEYKPSKEIIEGYEADKHIRGDKFDLDFCHKLIDFFKESIEKHKDWSKFNFYFSPTESYGDISEFYLDVEKQGYRMHFENISAETIDEYVEKGDLFLFQIYNKDFVKAATGKKDMHTIYWNAAFSPENLQDVVVKLNGEAELFYRDKSDIKEIVHREGEILVNRTYNGRTPVPDKIHKKLTDYHNGRTKDLGEAKEYLDKVRYFKAHYDITKDRRYLNDKIYFHVPLTLNFKANGKKNLNKMVIEKFLSDEKAHIIGIDRGERNLLYYSIIDRSGKIIDQQSLNVIDGFDYREKLNQREIEMKDARQSWNAIGKIKDLKEGYLSKAVHEITKMAIQYNAIVVMEELNYGFKRGRFKVEKQIYQKFENMLIDKMNYLVFKDAPDESPGGVLNAYQLTNPLESFAKLGKQTGILFYVPAAYTSKIDPTTGFVNLFNTSSKTNAQERKEFLQKFESISYSAKDGGIFAFAFDYRKFGTSKTDHKNVWTAYTNGERMRYIKEKKRNELFDPSKEIKEALTSSGIKYDGGQNILPDILRSNNNGLIYTMYSSFIAAIQMRVYDGKEDYIISPIKNSKGEFFRTDPKRRELPIDADANGAYNIALRGELTMRAIAEKFDPDSEKMAKLELKHKDWFEFMQTRGDKRPAATKKAGQAKKKKGSYPYDVPDYAYPYDVPDYAYPYDVPDYA

SEQ ID NO: 290 - protein, 1327 aa, Eubacterium eligens
MNGNRSIVYREFVGVIPVAKTLRNELRPVGHTQEHIIQNGLIQEDELRQEKSTELKNIMDDYYREYIDKSLSGVTDLDFTLLFELMNLVQSSPSKDNKKALEKEQSKMREQICTHLQSDSNYKNIFNAKLLKEILPDFIKNYNQYDVKDKAGKLETLALFNGFSTYFTDFFEKRKNVFTKEAVSTSIAYRIVHENSLIFLANMTSYKKISEKALDEIEVIEKNNQDKMGDWELNQIFNPDFYNMVLIQSGIDFYNEICGVVNAHMNLYCQQTKNNYNLFKMRKLHKQILAYTSTSFEVPKMFEDDMSVYNAVNAFIDETEKGNIIGKLKDIVNKYDELDEKRIYISKDFYETLSCFMSGNWNLITGCVENFYDENIHAKGKSKEEKVKKAVKEDKYKSINDVNDLVEKYIDEKERNEFKNSNAKQYIREISNIITDTETAHLEYDDHISLIESEEKADEMKKRLDMYMNMYHWAKAFIVDEVLDRDEMFYSDIDDIYNILENIVPLYNRVRNYVTQKPYNSKKIKLNFQSPTLANGWSQSKEFDNNAIILIRDNKYYLAIFNAKNKPDKKIIQGNSDKKNDNDYKKMVYNLLPGANKMLPKVFLSKKGIETFKPSDYIISGYNAHKHIKTSENFDISFCRDLIDYFKNSIEKHAEWRKYEFKFSATDSYSDISEFYREVEMQGYRIDWTYISEADINKLDEEGKIYLFQIYNKDFAENSTGKENLHTMYFKNIFSEENLKDIIIKLNGQAELFYRRASVKNPVKHKKDSVLVNKTYKNQLDNGDVVRIPIPDDIYNEIYKMYNGYIKESDLSEAAKEYLDKVEVRTAQKDIVKDYRYTVDKYFIHTPITINYKVTARNNVNDMVVKYIAQNDDIHVIGIDRGERNLIYISVIDSHGNIVKQKSYNILNNYDYKKKLVEKEKTREYARKNWKSIGNIKELKEGYISGVVHEIAMLIVEYNAIIAMEDLNYGFKRGRFKVERQVYQKFESMLINKLNYFASKEKSVDEPGGLLKGYQLTYVPDNIKNLGKQCGVIFYVPAAFTSKIDPSTGFISAFNFKSISTNASRKQFFMQFDEIRYCAEKDMFSFGFDYNNFDTYNITMGKTQWTVYTNGERLQSEFNNARRTGKTKSINLTETIKLLLEDNEINYADGHDIRIDMEKMDEDKKSEFFAQLLSLYKLTVQMRNSYTEAEEQENGISYDKIISPVINDEGEFFDSDNYKESDDKECKMPKDADANGAYCIALKGLYEVLKIKSEWTEDGFDRNCLKLPHAEWLDFIQNKRYEKRPAATKKAGQAKKKKGSYPYDVPDYAYPYDVPDYAYPYDVPDYA

SEQ ID NO: 291 - protein, 1418 aa, Moraxella bovoculi
MLFQDFTHLYPLSKTVRFELKPIDRTLEHIHAKNFLSQDETMADMHQKVKVILDDYHRDFIADMMGEVKLTKLAEFYDVYLKFRKNPKDDELQKQLKDLQAVLRKEIVKPIGNGGKYKAGYDRLFGAKLFKDGKELGDLAKFVIAQEGESSPKLAHLAHFEKFSTYFTGFHDNRKNMYSDEDKHTAIAYRLIHENLPRFIDNLQILTTIKQKHSALYDQIINELTASGLDVSLASHLDGYHKLLTQEGITAYNTLLGGISGEAGSPKIQGINELINSHHNQHCHKSERIAKLRPLHKQILSDGMSVSFLPSKFADDSEMCQAVNEFYRHYADVFAKVQSLFDGFDDHQKDGIYVEHKNLNELSKQAFGDFALLGRVLDGYYVDVVNPEFNERFAKAKTDNAKAKLTKEKDKFIKGVHSLASLEQAIEHYTARHDDESVQAGKLGQYFKHGLAGVDNPIQKIHNNHSTIKGFLERERPAGERALPKIKSGKNPEMTQLRQLKELLDNALNVAHFAKLLTTKTTLDNQDGNFYGEFGVLYDELAKIPTLYNKVRDYLSQKPFSTEKYKLNFGNPTLLNGWDLNKEKDNFGVILQKDGCYYLALLDKAHKKVFDNAPNTGKSIYQKMIYKYLEVRKQFPKVFFSKEAIAINYHPSKELVEIKDKGRQRSDDERLKLYRFILECLKIHPKYDKKFEGAIGDIQLFKKDKKGREVPISEKDLFDKINGIFSSKPKLEMEDFFIGEFKRYNPSQDLVDQYNIYKKIDSNDNRKKENFYNNHPKFKKDLVRYYYESMCKHEEWEESFEFSKKLQDIGCYVDVNELFTEIETRRLNYKISFCNINADYIDELVEQGQLYLFQIYNKDFSPKAHGKPNLHTLYFKALFSEDNLADPIYKLNGEAQIFYRKASLDMNETTIHRAGEVLENKNPDNPKKRQFVYDIIKDKRYTQDKFMLHVPITMNFGVQGMTIKEFNKKVNQSIQQYDEVNVIGIDRGERHLLYLTVINSKGEILEQCSLNDITTASANGTQMTTPYHKILDKREIERLNARVGWGEIETIKELKSGYLSHVVHQISQLMLKYNAIVVLEDLNFGFKRGRFKVEKQIYQNFENALIKKLNHLVLKDKADDEIGSYKNALQLTNNFTDLKSIGKQTGFLFYVPAWNTSKIDPETGFVDLLKPRYENIAQSQAFFGKFDKICYNADKDYFEFHIDYAKFTDKAKNSRQIWTICSHGDKRYVYDKTANQNKGAAKGINVNDELKSLFARHHINEKQPNLVMDICQNNDKEFHKSLMYLLKTLLALRYSNASSDEDFILSPVANDEGVFFNSALADDTQPQNADANGAYHIALKGLWLLNELKNSDDLNKVKLAIDNQTWLNFAQNRKRPAATKKAGQAKKKKGSYPYDVPDYAYPYDVPDYAYPYDVPDYA

SEQ ID NO: 292 - protein, 1308 aa, Leptospira inadai
MEDYSGFVNIYSIQKTLRFELKPVGKTLEHIEKKGFLKKDKIRAEDYKAVKKIIDKYHRAYIEEVFDSVLHQKKKKDKTRFSTQFIKEIKEFSELYYKTEKNIPDKERLEALSEKLRKMLVGAFKGEFSEEVAEKYKNLFSKELIRNEIEKFCETDEERKQVSNFKSFTTYFTGFHSNRQNIYSDEKKSTAIGYRIIHQNLPKFLDNLKIIESIQRRFKDFPWSDLKKNLKKIDKNIKLTEYFSIDGFVNVLNQKGIDAYNTILGGKSEESGEKIQGLNEYINLYRQKNNIDRKNLPNVKILFKQILGDRETKSFIPEAFPDDQSVLNSITEFAKYLKLDKKKKSIIAELKKFLSSFNRYELDGIYLANDNSLASISTFLFDDWSFIKKSVSFKYDESVGDPKKKIKSPLKYEKEKEKWLKQKYYTISFLNDAIESYSKSQDEKRVKIRLEAYFAEFKSKDDAKKQFDLLERIEEAYAIVEPLLGAEYPRDRNLKADKKEVGKIKDFLDSIKSLQFFLKPLLSAEIFDEKDLGFYNQLEGYYEEIDSIGHLYNKVRNYLTGKIYSKEKFKLNFENSTLLKGWDENREVANLCVIFREDQKYYLGVMDKENNTILSDIPKVKPNELFYEKMVYKLIPTPHMQLPRIIFSSDNLSIYNPSKSILKIREAKSFKEGKNFKLKDCHKFIDFYKESISKNEDWSRFDFKFSKTSSYENISEFYREVERQGYNLDFKKVSKFYIDSLVEDGKLYLFQIYNKDFSIFSKGKPNLHTIYFRSLFSKENLKDVCLKLNGEAEMFFRKKSINYDEKKKREGHHPELFEKLKYPILKDKRYSEDKFQFHLPISLNFKSKERLNFNLKVNEFLKRNKDINIIGIDRGERNLLYLVMINQKGEILKQTLLDSMQSGKGRPEINYKEKLQEKEIERDKARKSWGTVENIKELKEGYLSIVIHQISKLMVENNAIVVLEDLNIGFKRGRQKVERQVYQKFEKMLIDKLNFLVFKENKPTEPGGVLKAYQLTDEFQSFEKLSKQTGFLFYVPSWNTSKIDPRTGFIDFLHPAYENIEKAKQWINKFDSIRFNSKMDWFEFTADTRKFSENLMLGKNRVWVICTTNVERYFTSKTANSSIQYNSIQITEKLKELFVDIPFSNGQDLKPEILRKNDAVFFKSLLFYIKTTLSLRQNNGKKGEEEKDFILSPVVDSKGRFFNSLEASDDEPKDADANGAYHIALKGLMNLLVLNETKEENLSRPKWKIKNKDWLEFVWERNRKRPAATKKAGQAKKKKGSYPYDVPDYAYPYDVPDYAYPYDVPDYA

SEQ ID NO: 293 - protein, 1273 aa, Lachnospiraceae bacterium
MSKLEKFTNCYSLSKTLRFKAIPVGKTQENIDNKRLLVEDEKRAEDYKGVKKLLDRYYLSFINDVLHSIKLKNLNNYISLFRKKTRTEKENKELENLEINLRKEIAKAFKGNEGYKSLFKKDIIETILPEFLDDKDEIALVNSFNGFTTAFTGFFDNRENMFSEEAKSTSIAFRCINENLTRYISNMDIFEKVDAIFDKHEVQEIKEKILNSDYDVEDFFEGEFFNFVLTQEGIDVYNAIIGGFVTESGEKIKGLNEYINLYNQKTKQKLPKFKPLYKQVLSDRESLSFYGEGYTSDEEVLEVFRNTLNKNSEIFSSIKKLEKLFKNFDEYSSAGIFVKNGPAISTISKDIFGEWNVIRDKWNAEYDDIHLKKKAVVTEKYEDDRRKSFKKIGSFSLEQLQEYADADLSVVEKLKEIIIQKVDEIYKVYGSSEKLFDADFVLEKSLKKNDAVVAIMKDLLDSVKSFENYIKAFFGEGKETNRDESFYGDFVLAYDILLKVDHIYDAIRNYVTQKPYSKDKFKLYFQNPQFMGGWDKDKETDYRATILRYGSKYYLAIMDKKYAKCLQKIDKDDVNGNYEKINYKLLPGPNKMLPKVFFSKKWMAYYNPSEDIQKIYKNGTFKKGDMFNLNDCHKLIDFFKDSISRYPKWSNAYDFNFSETEKYKDIAGFYREVEEQGYKVSFESASKKEVDKLVEEGKLYMFQIYNKDFSDKSHGTPNLHTMYFKLLFDENNHGQIRLSGGAELFMRRASLKKEELVVHPANSPIANKNPDNPKKTTTLSYDVYKDKRFSEDQYELHIPIAINKCPKNIFKINTEVRVLLKHDDNPYVIGIDRGERNLLYIVVVDGKGNIVEQYSLNEIINNFNGIRIKTDYHSLLDKKEKERFEARQNWTSIENIKELKAGYISQVVHKICELVEKYDAVIALEDLNSGFKNSRVKVEKQVYQKFEKMLIDKLNYMVDKKSNPCATGGALKGYQITNKFESFKSMSTQNGFIFYIPAWLTSKIDPSTGFVNLLKTKYTSIADSKKFISSFDRIMYVPEEDLFEFALDYKNFSRTDADYIKKWKLYSYGNRIRIFRNPKKNNVFDWEEVCLTSAYKELFNKYGINYQQGDIRALLCEQSDKAFYSSFMALMSLMLQMRNSITGRTDVDFLISPVKNSDGIFYDSRNYEAQENAILPKNADANGAYNIARKVLWAIGQFKKAEDEKLDKVKIAISNKEWLEYAQTSVKHKRPAATKKAGQAKKKKGSYPYDVPDYAYPYDVPDYAYPYDVPDYA

SEQ ID NO: 294 - protein, 1305 aa, Porphyromonas crevioricanis
MDSLKDFTNLYPVSKTLRFELKPVGKTLENIEKAGILKEDEHRAESYRRVKKIIDTYHKVFIDSSLENMAKMGIENEIKAMLQSFCELYKKDHRTEGEDKALDKIRAVLRGLIVGAFTGVCGRRENTVQNEKYESLFKEKLIKEILPDFVLSTEAESLPFSVEEATRSLKEFDSFTSYFAGFYENRKNIYSTKPQSTAIAYRLIHENLPKFIDNILVFQKIKEPIAKELEHIRADFSAGGYIKKDERLEDIFSLNYYIHVLSQAGIEKYNALIGKIVTEGDGEMKGLNEHINLYNQQRGREDRLPLFRPLYKQILSDREQLSYLPESFEKDEELLRALKEFYDHIAEDILGRTQQLMTSISEYDLSRIYVRNDSQLTDISKKMLGDWNAIYMARERAYDHEQAPKRITAKYERDRIKALKGEESISLANLNSCIAFLDNVRDCRVDTYLSTLGQKEGPHGLSNLVENVFASYHEAEQLLSFPYPEENNLIQDKDNVVLIKNLLDNISDLQRFLKPLWGMGDEPDKDERFYGEYNYIRGALDQVIPLYNKVRNYLTRKPYSTRKVKLNFGNSQLLSGWDRNKEKDNSCVILRKGQNFYLAIMNNRHKRSFENKMLPEYKEGEPYFEKMDYKFLPDPNKMLPKVFLSKKGIEIYKPSPKLLEQYGHGTHKKGDTFSMDDLHELIDFFKHSIEAHEDWKQFGFKFSDTATYENVSSFYREVEDQGYKLSFRKVSESYVYSLIDQGKLYLFQIYNKDFSPCSKGTPNLHTLYWRMLFDERNLADVIYKLDGKAEIFFREKSLKNDHPTHPAGKPIKKKSRQKKGEESLFEYDLVKDRRYTMDKFQFHVPITMNFKCSAGSKVNDMVNAHIREAKDMHVIGIDRGERNLLYICVIDSRGTILDQISLNTINDIDYHDLLESRDKDRQQEHRNWQTIEGIKELKQGYLSQAVHRIAELMVAYKAVVALEDLNMGFKRGRQKVESSVYQQFEKQLIDKLNYLVDKKKRPEDIGGLLRAYQFTAPFKSFKEMGKQNGFLFYIPAWNTSNIDPTTGFVNLFHVQYENVDKAKSFFQKFDSISYNPKKDWFEFAFDYKNFTKKAEGSRSMWILCTHGSRIKNFRNSQKNGQWDSEEFALTEAFKSLFVRYEIDYTADLKTAIVDEKQKDFFVDLLKLFKLTVQMRNSWKEKDLDYLISPVAGADGRFFDTREGNKSLPKDADANGAYNIALKGLWALRQIRQTSEGGKLKLAISNKEWLQFVQERSYEKDKRPAATKKAGQAKKKKGSYPYDVPDYAYPYDVPDYAYPYDVPDYA

SEQ ID NO: 295 - protein, 1368 aa, Prevotella disiens
MENYQEFTNLFQLNKTLRFELKPIGKTCELLEEGKIFASGSFLEKDKVRADNVSYVKKEIDKKHKIFIEETLSSFSISNDLLKQYFDCYNELKAFKKDCKSDEEEVKKTALRNKCTSIQRAMREAISQAFLKSPQKKLLAIKNLIENVFKADENVQHFSEFTSYFSGFETNRENFYSDEEKSTSIAYRLVHDNLPIFIKNIYIFEKLKEQFDAKTLSEIFENYKLYVAGSSLDEVFSLEYFNNTLTQKGIDNYNAVIGKIVKEDKQEIQGLNEHINLYNQKHKDRRLPFFISLKKQILSDREALSWLPDMFKNDSEVIKALKGFYIEDGFENNVLTPLATLLSSLDKYNLNGIFIRNNEALSSLSQNVYRNFSIDEAIDANAELQTFNNYELIANALRAKIKKETKQGRKSFEKYEEYIDKKVKAIDSLSIQEINELVENYVSEFNSNSGNMPRKVEDYFSLMRKGDFGSNDLIENIKTKLSAAEKLLGTKYQETAKDIFKKDENSKLIKELLDATKQFQHFIKPLLGTGEEADRDLVFYGDFLPLYEKFEELTLLYNKVRNRLTQKPYSKDKIRLCFNKPKLMTGWVDSKTEKSDNGTQYGGYLFRKKNEIGEYDYFLGISSKAQLFRKNEAVIGDYERLDYYQPKANTIYGSAYEGENSYKEDKKRLNKVIIAYIEQIKQTNIKKSIIESISKYPNISDDDKVTPSSLLEKIKKVSIDSYNGILSFKSFQSVNKEVIDNLLKTISPLKNKAEFLDLINKDYQIFTEVQAVIDEICKQKTFIYFPISNVELEKEMGDKDKPLCLFQISNKDLSFAKTFSANLRKKRGAENLHTMLFKALMEGNQDNLDLGSGAIFYRAKSLDGNKPTHPANEAIKCRNVANKDKVSLFTYDIYKNRRYMENKFLFHLSIVQNYKAANDSAQLNSSATEYIRKADDLHIIGIDRGERNLLYYSVIDMKGNIVEQDSLNIIRNNDLETDYHDLLDKREKERKANRQNWEAVEGIKDLKKGYLSQAVHQIAQLMLKYNAIIALEDLGQMFVTRGQKIEKAVYQQFEKSLVDKLSYLVDKKRPYNELGGILKAYQLASSITKNNSDKQNGFLFYVPAWNTSKIDPVTGFTDLLRPKAMTIKEAQDFFGAFDNISYNDKGYFEFETNYDKFKIRMKSAQTRWTICTFGNRIKRKKDKNYWNYEEVELTEEFKKLFKDSNIDYENCNLKEEIQNKDNRKFFDDLIKLLQLTLQMRNSDDKGNDYIISPVANAEGQFFDSRNGDKKLPLDADANGAYNIARKGLWNIRQIKQTKNDKKLNLSISSTEWLDFVREKPYLKKRPAATKKAGQAKKKKGSYPYDVPDYAYPYDVPDYAYPYDVPDYA

SEQ ID NO: 296 - protein, 1291 aa, Porphyromonas macacae
MKTQHFFEDFTSLYSLSKTIRFELKPIGKTLENIKKNGLIRRDEQRLDDYEKLKKVIDEYHEDFIANILSSFSFSEEILQSYIQNLSESEARAKIEKTMRDTLAKAFSEDERYKSIFKKELVKKDIPVWCPAYKSLCKKFDNFTTSLVPFHENRKNLYTSNEITASIPYRIVHVNLPKFIQNIEALCELQKKMGADLYLEMMENLRNVWPSFVKTPDDLCNLKTYNHLMVQSSISEYNRFVGGYSTEDGTKHQGINEWINIYRQRNKEMRLPGLVFLHKQILAKVDSSSFISDTLENDDQVFCVLRQFRKLFWNTVSSKEDDAASLKDLFCGLSGYDPEAIYVSDAHLATISKNIFDRWNYISDAIRRKTEVLMPRKKESVERYAEKISKQIKKRQSYSLAELDDLLAHYSEESLPAGFSLLSYFTSLGGQKYLVSDGEVILYEEGSNIWDEVLIAFRDLQVILDKDFTEKKLGKDEEAVSVIKKALDSALRLRKFFDLLSGTGAEIRRDSSFYALYTDRMDKLKGLLKMYDKVRNYLTKKPYSIEKFKLHFDNPSLLSGWDKNKELNNLSVIFRQNGYYYLGIMTPKGKNLFKTLPKLGAEEMFYEKMEYKQIAEPMLMLPKVFFPKKTKPAFAPDQSVVDIYNKKTFKTGQKGFNKKDLYRLIDFYKEALTVHEWKLFNFSFSPTEQYRNIGEFFDEVREQAYKVSMVNVPASYIDEAVENGKLYLFQIYNKDFSPYSKGIPNLHTLYWKALFSEQNQSRVYKLCGGGELFYRKASLHMQDTTVHPKGISIHKKNLNKKGETSLFNYDLVKDKRFTEDKFFFHVPISINYKNKKITNVNQMVRDYIAQNDDLQIIGIDRGERNLLYISRIDTRGNLLEQFSLNVIESDKGDLRTDYQKILGDREQERLRRRQEWKSIESIKDLKDGYMSQVVHKICNMVVEHKAIVVLENLNLSFMKGRKKVEKSVYEKFERMLVDKLNYLVVDKKNLSNEPGGLYAAYQLTNPLFSFEELHRYPQSGILFFVDPWNTSLTDPSTGFVNLLGRINYTNVGDARKFFDRFNAIRYDGKGNILFDLDLSRFDVRVETQRKLWTLTTFGSRIAKSKKSGKWMVERIENLSLCFLELFEQFNIGYRVEKDLKKAILSQDRKEFYVRLIYLFNLMMQIRNSDGEEDYILSPALNEKNLQFDSRLIEAKDLPVDADANGAYNVARKGLMVVQRIKRGDHESIHRIGRAQWLRYVQEGIVEKRPAATKKAGQAKKKKGSYPYDVPDYAYPYDVPDYAYPYDVPDYA

SEQ ID NO: 297 - protein, 1343 aa, Thiomicrospira species
MTKTFDSEFFNLYSLQKTVRFELKPVGETASFVEDFKNEGLKRVVSEDERRAVDYQKVKEIIDDYHRDFIEESLNYFPEQVSKDALEQAFHLYQKLKAAKVEEREKALKEWEALQKKLREKVVKCFSDSNKARFSRIDKKELIKEDLINWLVAQNREDDIPTVETFNNFTTYFTGFHENRKNIYSKDDHATAISFRLIHENLPKFFDNVISFNKLKEGFPELKFDKVKEDLEVDYDLKHAFEIEYFVNFVTQAGIDQYNYLLGGKTLEDGTKKQGMNEQINLFKQQQTRDKARQIPKLIPLFKQILSERTESQSFIPKQFESDQELFDSLQKLHNNCQDKFTVLQQAILGLAEADLKKVFIKTSDLNALSNTIFGNYSVFSDALNLYKESLKTKKAQEAFEKLPAHSIHDLIQYLEQFNSSLDAEKQQSTDTVLNYFIKTDELYSRFIKSTSEAFTQVQPLFELEALSSKRRPPESEDEGAKGQEGFEQIKRIKAYLDTLMEAVHFAKPLYLVKGRKMIEGLDKDQSFYEAFEMAYQELESLIIPIYNKARSYLSRKPFKADKFKINFDNNTLLSGWDANKETANASILFKKDGLYYLGIMPKGKTFLFDYFVSSEDSEKLKQRRQKTAEEALAQDGESYFEKIRYKLLPGASKMLPKVFFSNKNIGFYNPSDDILRIRNTASHTKNGTPQKGHSKVEFNLNDCHKMIDFFKSSIQKHPEWGSFGFTFSDTSDFEDMSAFYREVENQGYVISFDKIKETYIQSQVEQGNLYLFQIYNKDFSPYSKGKPNLHTLYWKALFEEANLNNVVAKLNGEAEIFFRRHSIKASDKVVHPANQAIDNKNPHTEKTQSTFEYDLVKDKRYTQDKFFFHVPISLNFKAQGVSKFNDKVNGFLKGNPDVNIIGIDRGERHLLYFTVVNQKGEILVQESLNTLMSDKGHVNDYQQKLDKKEQERDAARKSWTTVENIKELKEGYLSHVVHKLAHLIIKYNAIVCLEDLNFGFKRGRFKVEKQVYQKFEKALIDKLNYLVFKEKELGEVGHYLTAYQLTAPFESFKKLGKQSGILFYVPADYTSKIDPTTGFVNFLDLRYQSVEKAKQLLSDFNAIRFNSVQNYFEFEIDYKKLTPKRKVGTQSKWVICTYGDVRYQNRRNQKGHWETEEVNVTEKLKALFASDSKTTTVIDYANDDNLIDVILEQDKASFFKELLWLLKLTMTLRHSKIKSEDDFILSPVKNEQGEFYDSRKAGEVWPKDADANGAYHIALKGLWNLQQINQWEKGKTLNLAIKNQDWFSFIQEKPYQEKRPAATKKAGQAKKKKGSYPYDVPDYAYPYDVPDYAYPYDVPDYA

SEQ ID NO: 298 - protein, 1296 aa, Moraxella bovoculi
MLFQDFTHLYPLSKTVRFELKPIGRTLEHIHAKNFLSQDETMADMYQKVKVILDDYHRDFIADMMGEVKLTKLAEFYDVYLKFRKNPKDDGLQKQLKDLQAVLRKESVKPIGSGGKYKTGYDRLFGAKLFKDGKELGDLAKFVIAQEGESSPKLAHLAHFEKFSTYFTGFHDNRKNMYSDEDKHTAIAYRLIHENLPRFIDNLQILTTIKQKHSALYDQIINELTASGLDVSLASHLDGYHKLLTQEGITAYNRIIGEVNGYTNKHNQICHKSERIAKLRPLHKQILSDGMGVSFLPSKFADDSEMCQAVNEFYRHYTDVFAKVQSLFDGFDDHQKDGIYVEHKNLNELSKQAFGDFALLGRVLDGYYVDVVNPEFNERFAKAKTDNAKAKLTKEKDKFIKGVHSLASLEQAIEHHTARHDDESVQAGKLGQYFKHGLAGVDNPIQKIHNNHSTIKGFLERERPAGERALPKIKSGKNPEMTQLRQLKELLDNALNVAHFAKLLTTKTTLDNQDGNFYGEFGVLYDELAKIPTLYNKVRDYLSQKPFSTEKYKLNFGNPTLLNGWDLNKEKDNFGVILQKDGCYYLALLDKAHKKVFDNAPNTGKNVYQKMVYKLLPGPNKMLPKVFFAKSNLDYYNPSAELLDKYAKGTHKKGDNFNLKDCHALIDFFKAGINKHPEWQHFGFKFSPTSSYRDLSDFYREVEPQGYQVKFVDINADYIDELVEQGKLYLFQIYNKDFSPKAHGKPNLHTLYFKALFSEDNLADPIYKLNGEAQIFYRKASLDMNETTIHRAGEVLENKNPDNPKKRQFVYDIIKDKRYTQDKFMLHVPITMNFGVQGMTIKEFNKKVNQSIQQYDEVNVIGIDRGERHLLYLTVINSKGEILEQRSLNDITTASANGTQVTTPYHKILDKREIERLNARVGWGEIETIKELKSGYLSHVVHQINQLMLKYNAIVVLEDLNFGFKRGRFKVEKQIYQNFENALIKKLNHLVLKDKADDEIGSYKNALQLTNNFTDLKSIGKQTGFLFYVPAWNTSKIDPETGFVDLLKPRYENIAQSQAFFGKFDKICYNTDKGYFEFHIDYAKFTDKAKNSRQKWAICSHGDKRYVYDKTANQNKGAAKGINVNDELKSLFARYHINDKQPNLVMDICQNNDKEFHKSLMCLLKTLLALRYSNASSDEDFILSPVANDEGVFFNSALADDTQPQNADANGAYHIALKGLWLLNELKNSDDLNKVKLAIDNQTWLNFAQNRKRPAATKKAGQAKKKKGSYPYDVPDYAYPYDVPDYAYPYDVPDYA

SEQ ID NO: 299 - protein, 1306 aa, Moraxella bovoculi
MLFQDFTHLYPLSKTVRFELKPIGKTLEHIHAKNFLNQDETMADMYQKVKAILDDYHRDFIADMMGEVKLTKLAEFYDVYLKFRKNPKDDGLQKQLKDLQAVLRKEIVKPIGNGGKYKAGYDRLFGAKLFKDGKELGDLAKFVIAQEGESSPKLAHLAHFEKFSTYFTGFHDNRKNMYSDEDKHTAIAYRLIHENLPRFIDNLQILATIKQKHSALYDQIINELTASGLDVSLASHLDGYHKLLTQEGITAYNTLLGGISGEAGSRKIQGINELINSHHNQHCHKSERIAKLRPLHKQILSDGMGVSFLPSKFADDSEVCQAVNEFYRHYADVFAKVQSLFDGFDDYQKDGIYVEYKNLNELSKQAFGDFALLGRVLDGYYVDVVNPEFNERFAKAKTDNAKAKLTKEKDKFIKGVHSLASLEQAIEHYTARHDDESVQAGKLGQYFKHGLAGVDNPIQKIHNNHSTIKGFLERERPAGERALPKIKSDKSPEIRQLKELLDNALNVAHFAKLLTTKTTLHNQDGNFYGEFGALYDELAKIATLYNKVRDYLSQKPFSTEKYKLNFGNPTLLNGWDLNKEKDNFGVILQKDGCYYLALLDKAHKKVFDNAPNTGKSVYQKMIYKLLPGPNKMLPKVFFAKSNLDYYNPSAELLDKYAQGTHKKGDNFNLKDCHALIDFFKAGINKHPEWQHFGFKFSPTSSYQDLSDFYREVEPQGYQVKFVDINADYINELVEQGQLYLFQIYNKDFSPKAHGKPNLHTLYFKALFSEDNLVNPIYKLNGEAEIFYRKASLDMNETTIHRAGEVLENKNPDNPKKRQFVYDIIKDKRYTQDKFMLHVPITMNFGVQGMTIKEFNKKVNQSIQQYDEVNVIGIDRGERHLLYLTVINSKGEILEQRSLNDITTASANGTQMTTPYHKILDKREIERLNARVGWGEIETIKELKSGYLSHVVHQISQLMLKYNAIVVLEDLNFGFKRGRFKVEKQIYQNFENALIKKLNHLVLKDKADDEIGSYKNALQLTNNFTDLKSIGKQTGFLFYVPAWNTSKIDPETGFVDLLKPRYENIAQSQAFFGKFDKICYNADRGYFEFHIDYAKFNDKAKNSRQIWKICSHGDKRYVYDKTANQNKGATIGVNVNDELKSLFTRYHINDKQPNLVMDICQNNDKEFHKSLMYLLKTLLALRYSNASSDEDFILSPVANDEGVFFNSALADDTQPQNADANGAYHIALKGLWLLNELKNSDDLNKVKLAIDNQTWLNFAQNRKRPAATKKAGQAKKKKGSYPYDVPDYAYPYDVPDYAYPYDVPDYA

SEQ ID NO: 300 - protein, 1251 aa, Butyrivibrio species
MYYQNLTKKYPVSKTIRNELIPIGKTLENIRKNNILESDVKRKQDYEHVKGIMDEYHKQLINEALDNYMLPSLNQAAEIYLKKHVDVEDREEFKKTQDLLRREVTGRLKEHENYTKIGKKDILDLLEKLPSISEEDYNALESFRNFYTYFTSYNKVRENLYSDEEKSSTVAYRLINENLPKFLDNIKSYAFVKAAGVLADCIEEEEQDALFMVETFNMTLTQEGIDMYNYQIGKVNSAINLYNQKNHKVEEFKKIPKMKVLYKQILSDREEVFIGEFKDDETLLSSIGAYGNVLMTYLKSEKINIFFDALRESEGKNVYVKNDLSKTTMSNIVFGSWSAFDELLNQEYDLANENKKKDDKYFEKRQKELKKNKSYTLEQMSNLSKEDISPIENYIERISEDIEKICIYNGEFEKIVVNEHDSSRKLSKNIKAVKVIKDYLDSIKELEHDIKLINGSGQELEKNLVVYVGQEEALEQLRPVDSLYNLTRNYLTKKPFSTEKVKLNFNKSTLLNGWDKNKETDNLGILFFKDGKYYLGIMNTTANKAFVNPPAAKTENVFKKVDYKLLPGSNKMLPKVFFAKSNIGYYNPSTELYSNYKKGTHKKGPSFSIDDCHNLIDFFKESIKKHEDWSKFGFEFSDTADYRDISEFYREVEKQGYKLTFTDIDESYINDLIEKNELYLFQIYNKDFSEYSKGKLNLHTLYFMMLFDQRNLDNVVYKLNGEAEVFYRPASIAENELVIHKAGEGIKNKNPNRAKVKETSTFSYDIVKDKRYSKYKFTLHIPITMNFGVDEVRRFNDVINNALRTDDNVNVIGIDRGERNLLYVVVINSEGKILEQISLNSIINKEYDIETNYHALLDEREDDRNKARKDWNTIENIKELKTGYLSQVVNVVAKLVLKYNAIICLEDLNFGFKRGRQKVEKQVYQKFEKMLIEKLNYLVIDKSREQVSPEKMGGALNALQLTSKFKSFAELGKQSGIIYYVPAYLTSKIDPTTGFVNLFYIKYENIEKAKQFFDGFDFIRFNKKDDMFEFSFDYKSFTQKACGIRSKWIVYTNGERIIKYPNPEKNNLFDEKVINVTDEIKGLFKQYRIPYENGEDIKEIIISKAEADFYKRLFRLLHQTLQMRNSTSDGTRDYIISPVKNDRGEFFCSEFSEGTMPKDADANGAYNIARKGLWVLEQIRQKDEGEKVNLSMTNAEWLKYAQLHLLKRPAATKKAGQAKKKKGSYPYDVPDYAYPYDVPDYAYPYDVPDYA

SEQ ID NO: 301 - protein, 1145 aa, Alicyclobacillus macrosporangiidus
MVAVKSIKVKLMLGHLPEIREGLWHLHEAVNLGVRYYTEWLALLRQGNLYRRGKDGAQECYMTAEQCRQELLVRLRDRQKRNGHTGDPGTDEELLGVARRLYELLVPQSVGKKGQAQMLASGFLSPLADPKSEGGKGTSKSGRKPAWMGMKEAGDSRWVEAKARYEANKAKDPTKQVIASLEMYGLRPLFDVFTETYKTIRWMPLGKHQGVRAWDRDMFQQSLERLMSWESWNERVGAEFARLVDRRDRFREKHFTGQEHLVALAQRLEQEMKEASPGFESKSSQAHRITKRALRGADGIIDDWLKLSEGEPVDRFDEILRKRQAQNPRRFGSHDLFLKLAEPVFQPLWREDPSFLSRWASYNEVLNKLEDAKQFATFTLPSPCSNPVWARFENAEGTNIFKYDFLFDHFGKGRHGVRFQRMIVMRDGVPTEVEGIVVPIAPSRQLDALAPNDAASPIDVFVGDPAAPGAFRGQFGGAKIQYRRSALVRKGRREEKAYLCGFRLPSQRRTGTPADDAGEVFLNLSLRVESQSEQAGRRNPPYAAVFHISDQTRRVIVRYGEIERYLAEHPDTGIPGSRGLTSGLRVMSVDLGLRTSAAISVFRVAHRDELTPDAHGRQPFFFPIHGMDHLVALHERSHLIRLPGETESKKVRSIREQRLDRLNRLRSQMASLRLLVRTGVLDEQKRDRNWERLQSSMERGGERMPSDWWDLFQAQVRYLAQHRDASGEAWGRMVQAAVRTLWRQLAKQVRDWRKEVRRNADKVKIRGIARDVPGGHSLAQLDYLERQYRFLRSWSAFSVQAGQVVRAERDSRFAVALREHIDNGKKDRLKKLADRILMEALGYVYVTDGRRAGQWQAVYPPCQLVLLEELSEYRFSNDRPPSENSQLMVWSHRGVLEELIHQAQVHDVLVGTIPAAFSSRFDARTGAPGIRCRRVPSIPLKDAPSIPIWLSHYLKQTERDAAALRPGELIPTGDGEFLVTPAGRGASGVRVVHADINAAHNLQRRLWENFDLSDIRVRCDRREGKDGTVVLIPRLTNQRVKERYSGVIFTSEDGVSFTVGDAKTRRRSSASQGEGDDLSDEEQELLAEADDARERSVVLFRDPSGFVNGGRWTAQRAFWGMVHNRIETLLAERFSVSGAAEKVRG

SEQ ID NO: 302 - protein, 1108 aa, Bacillus hisashii
MATRSFILKIEPNEEVKKGLWKTHEVLNHGIAYYMNILKLIRQEAIYEHHEQDPKNPKKVSKAEIQAELWDFVLKMQKCNSFTHEVDKDEVFNILRELYEELVPSSVEKKGEANQLSNKFLYPLVDPNSQSGKGTASSGRKPRWYNLKIAGDPSWEEEKKKWEEDKKKDPLAKILGKLAEYGLIPLFIPYTDSNEPIVKEIKWMEKSRNQSVRRLDKDMFIQALERFLSWESWNLKVKEEYEKVEKEYKTLEERIKEDIQALKALEQYEKERQEQLLRDTLNTNEYRLSKRGLRGWREIIQKWLKMDENEPSEKYLEVFKDYQRKHPREAGDYSVYEFLSKKENHFIWRNHPEYPYLYATFCEIDKKKKDAKQQATFTLADPINHPLWVRFEERSGSNLNKYRILTEQLHTEKLKKKLTVQLDRLIYPTESGGWEEKGKVDIVLLPSRQFYNQIFLDIEEKGKHAFTYKDESIKFPLKGTLGGARVQFDRDHLRRYPHKVESGNVGRIYFNMTVNIEPTESPVSKSLKIHRDDFPKVVNFKPKELTEWIKDSKGKKLKSGIESLEIGLRVMSIDLGQRQAAAASIFEVVDQKPDIEGKLFFPIKGTELYAVHRASFNIKLPGETLVKSREVLRKAREDNLKLMNQKLNFLRNVLHFQQFEDITEREKRVTKWISRQENSDVPLVYQDELIQIRELMYKPYKDWVAFLKQLHKRLEVEIGKEVKHWRKSLSDGRKGLYGISLKNIDEIDRTRKFLLRWSLRPTEPGEVRRLEPGQRFAIDQLNHLNALKEDRLKKMANTIIMHALGYCYDVRKKKWQAKNPACQIILFEDLSNYNPYEERSRFENSKLMKWSRREIPRQVALQGEIYGLQVGEVGAQFSSRFHAKTGSPGIRCSVVTKEKLQDNRFFKNLQREGRLTLDKIAVLKEGDLYPDKGGEKFISLSKDRKCVTTHADINAAQNLQKRFWTRTHGFYKVYCKAYQVDGQTVYIPESKDQKQKIIEEFGEGYFILKDGVYEWVNAGKLKIKKGSSKQSSSELVDSDILKDSFDLASELKGEKLMLYRDPSGNVFPSDKWMAAGVFFGKLERILISKLTNQYSISTIEDDSSKQSM

SEQ ID NO: 303 - protein, 1364 aa, Candidatus Lindowbacteria bacterium
MPRDDLDLLTNLNSTAKGIRERGKTKEGTDKKKSGRKSSWPMDKAAWETAKTSDSSAHFLEKLKQHPDLKDAFGNLSSGGSKKLEYYKKLAGSAPWKESQSVILEKAARWKEAKQEREEKEQDSSEHGSKAAYRRLFDAGCLPMPEFAKYIDENQIEFGDLKLSDCGAEWKRGMWNQAGQRVRSHMGWQRRREKENAVYSLRKELFEKGGAIRRKKSEELTPEDILPGKAAPDQNDWQERPAYGNQMWFIGLRSYEENEMAKYAEEAGMGSRSAPRIRRGTIKGWSKLRERWLQILKRNPQATRDDLIGELNALRSQDPRAYGDARLFDWLSKTDQRFLWDGFDADGKILCGRDDRDCVSAFVAYNEEFADEPSSITLTETDERLHPVWPFFGESSAVPYEIEYDLETACPTAIRLPLLVGKENGGYAERQGTRLPLAEYADLASSFQLPTPVRLDVLVEIREVTRAGRKVTCPFSYFKQNGVWYVREGEIPSGESIQIKQTDRKIENGKIFISSKLRMAYRDDLMVSPATGDFGSIKILWERIELASHVDQKKLPETAPARSRVFVSFSCNVVERAPRKQLTRKPDAVVVTIPSGVDQGLVVVSTDVRTGKSKSSSAPPLPPGSRLWPADAVHGDPPLRILSVDLGHRHSAYAVWELGLQQKSWRAGVLKGSTQTPVYADCTGTGLLCLPGDGEDTPAEEESLRLRSRQIRRRLNLQNSILRVSRLLSLDKFEKTIFEQSDVRDRPNKKGLRIRRRCRTEKTPLSEAEVRKNCDKAAEILIRWADTDAMAKSLAATGNADISFWKYMAVKNPPLSAVVDVAPSTIVPDDGPDRETLKKKRQEEEEKFASSIYENRVKLAGALCSGYDADHRRPATGGLWHDLDRTLIREISYGDRGQKGNPRKLNNEGILRLLRRPPRARPDWREFHRTLNDANRIPKGRTLRGGLSMGRLNFLKEVGDFVKKWSCRPRWPGDRRHIPPGQLFDRQDAEHLEHLRDDRIKRLAHLIVAQALGFEPDIRRGLWKYVDGSTGEILWQHPETRRFFAEGAAGELREVSRPAEIDDDAAARPHTVSAPAHIVVFENLIRYRFQSDRPKTENAGLMQWAHRQIVHFTKQVASLYGLKVAMVYAAFSSKFCSRCGSPGARVSRFDPAWRNQEWFKRRTSNPRSKVDHSLKRASEDPTADETRPWVLIEGGKEFVCANAKCSAHDEPLNADENAAANIGLRFLRGVEDFRTKVNPAGALKGKLRFETGIHSFRPPVSGSPFWSPMAEPAQKKKIGAAAPGADVDEAGDADESGVVVLFRDPSGAFRNKQYWYEGKIFWSNVMMAVEAKIAGASVGAKPVAASWGQAQPQSGPGLAKPGGD

SEQ ID NO: 304 - protein, 1364 aa, Elusimicrobia bacterium
MNRIYQGRVTKVEVPDGKDEKGNIKWKKLENWSDILWQHHMLFQDAVNYYTLALAAISGSAVGSDEKSIILREWAVQVQNIWEKAKKKATVFEGPQKRLTSILGLEQNASFDIAAKHILRTSEAKPEQRASALIRLLEEIDKKNHNVVCGERLPFFCPRNIQSKRSPTSKAVSSVQEQKRQEEVRRFHNMQPEEVVKNAVTLDISLFKSSPKIVFLEDPKKARAELLKQFDNACKKHKELVGIKKAFTESIDKHGSSLKVPAPGSKPSGLYPSAIVFKYFPVDITKTVFLKATEKLAMGKDREVTNDPIADARVNDKPHFDYFTNIALIREKEKNRAAWFEFDLAAFIEAIMSPHRFYQDTQKRKEAARKLEEKIKAIEGKGGQFKESDSEDDDVDSLPGFEGDTRIDLLRKLVTDTLGWLGESETPDNNEGKKTEYSISERTLRIFPDIQKQWSELAEKGETTEGKLLEVLKHEQTEHQSDFGSATLYQHLAKPEFHPIWLKSGTEEWHAENPLKAWLNYKELQYELTDKKRPIHFTPAHPVYSPRYFDFPKKSETEEKEVSKNTHSLTTSLASEHIKNSLQFTAGLIRKTNVGKKAIKARFSYSAPRLRRDCLRSENNENLYKAPWLQPMMRALGIDEEKADRQNFANTRITLMAKGLDDIQLGFPVEANSQELQKEVSNGISWKGQFNWGGIASLSALRWPHEKKPKNPPEQPWWGIDSFSCLAVDLGQRYAGAFARLDVSTIEKKGKSRFIGEACDKKWYAKVSRMGLLRLPGEDVKVWRDASKIDKENGFAFRKELFGEKGRSATPLEAEETAELIKLFGANEKDVMPDNWSKELSFPEQNDKLLIVARRAQAAVSRLHRWAWFFDEAKRSDDAIREILESDDTDLKQKVNKNEIEKVKETIISLLKVKQELLPTLLTRLANRVLPLRGRSWEWKKHHQKNDGFILDQTGKAMPNVLIRGQRGLSMDRIEQITELRKRFQALNQSLRRQIGKKAPAKRDDSIPDCCPDLLEKLDHMKEQRVNQTAHMILAEALGLKLAEPPKDKKELNETCDMHGAYAKVDNPVSFIVIEDLSRYRSSQGRSPRENSRLMKWCHRAVRDKLKEMCEVFFPLCERRKAGSAWVSLPPLLETPAAYSSRFCSRSGVAGFRAVEVIPGFELKYPWSWLKDKKDKAGNLAKEALNIRTVSEQLKAFNQDKPEKPRTLLVPIAGGPIFVPISEVGLSSFGLKPQVVQADINAAINLGLRAISDPRIWEIHPRLRTEKRDGRLFAREKRKYGEEKVEVQPSKNEKAKKVKDDRKPNYFADFSGKVDWGFGNIKNESGLTLVSGKALWWTINQLQWERCFDINKRHIEDWSNKQKQ

SEQ ID NO: 305 - protein, 1413 aa, Omnitrophica bacterium
MNRIYQGRVTKVEKLKNGKSPDDREELKDWQTALWRHHELFQDAVSYYTLALAAMAEGLPDKHPINVLRKRMEEAWEEFPRKTVTPAKNLRDSVRPWLGLSESASFGDALKKILPPAPENKEVRALAVALLAEKARTLKPQKTSASYWGRFCDDLKKKPNWDYSEEELARKTGSGDWVAGLWSEDALNKIDELAKSLKLSSLVKCVPDGQINPEGARNLVKEALDHLEGVSNGTKKEKNDPGPAKKTNNWLRQHASDVRNFIHKNKNQFSSLPNGRLITERARGGGININKTYAGVLFKAFPCPFTFDYVRAAVPEPKVKKVDQEKKSEQSATWTELEKRILRIGDDPIELARKNNKPIFKAFTALEKWSDQNSKSCWSDFDKCAFEEALKTLNQFNQKTEEREKRRSEAEAELKYMMDENPEWKPKKETEGDDVREVPILKGDPRYEKLVKLFGDLDEEGSEHATGKIYGPSRASLRGFGKLRNEWVDLFTKANDNPREQDLQKAVTGFQREHKLDMGYTAFFLKLCERDYWDIWRDDTEVEVKKIREKRWVKSVVYAAADTRELAEELERLQEPVRYTPAEPQFSRRLFMFSDIKGKQGAKHIREGLVEVSLAVKDQSGKYGTCRVRLHYSAPRLIRDHLSDGSSSMWLQPMMAALGLSSDARGCFTRDSKGNVKEPAVALMSDFVGRKRELRMLLNFPVDLDISKLEENIGKKARWEKQMNTAYEKNKLKQRFHLIWPGMELKETQEPGQFWWDNPTIQKEGMYCLAIDLSQRRAADYALLHAGVNRDSKTFVELGQAGGQSWFTKLCAAGSLRLPGEDTEVIREGKRQIELSGKKGRNATQSEYDQAIALAKQLLHNENSAELESAARDWLGDNAKRFSFPEQNDKLIDLYYGALSRYKTWLRWSWRLTEQHKELWDKTLDEIRKVPYFASWGELAGNGTNEATVQQLQKLIADAAVDLRNFLEKALLHIAYRALPLRENTWRWIENGKDGKGKPLHLLVSDGQSPAEIPWLRGQRGLSIARIEQLENFRRAVLSLNRLLRHEIGTKPEFGSSTCGESLPDPCPDLTDKIVRLKEERVNQTAHLIIAQSLGVRLKGHSLFTEEREKADMHGEHEVIPGRSPVDFVVLEDLSRYTTDKSRSRSENSRLMKWCHRKINEKVKLLAEPFGIPVIEVFASYSSKFDARTGAPGFRAVEVTSEDRPFWRKTIEKQSVAREVFDCLDNLVGKGLNGIHLVLPQNGGPLFIAAVKEDQPLPAIRQADINAAVNIGLRAIAGPSCYHAHPKVRLIKGESGTDKGKWLPRKGKEANKRENAQFGNVDLDLEVKFNRLDIDSDVLKGDNTNLFHDPLNIACYGFATIQNLQHPFLAHASAVFSRQKGAVARLQWEVCRAINSRRLEAWQKKAEKAAVKR

SEQ ID NO: 306 - protein, 747 aa, Phycisphaerae bacterium
MATKSYRARILTDSRLAAALDRTHVVFVESLKQMINTYLRMQNGKFGPDHKKLAQIMLSRSNTFAHGVMDQITRDQPTSTLDEEWTDLARRIHKTTGPLFLQAERFATVKNRAIHTKSRGKVIPSPETLAVPAKFWHQVCDSASAYIRSNRELMQQWRKDRAAWLKDKNEWQQKHPEFMQFYNGPYQNFLKLCDDDRITSQLAAEQQPTASKNNRPRKTGKRFARWHLWYKWLSENPEIIEWRNKASASDFKTVTDDVRKQIITKYPQQNKYITRLLDWLEDNNPELKTLENLRRTYVKKFDSFKRPPTLTLPSPYRHPYWFTMELDQFYKKADFENGTIQLLLIDEDDDGNWFFNWMPASLKPDPRLVPSWRAETFETEGRFPPYLGGKIGKKLSRPAPTDAERKAGIAGAKLMIKNNRSELLFTVFEQDCPPRVKWAKTKNRKCPADNAFSSDGKTRKPLRILSIDLGIRHIGAFALTQGTRNDSAWQTESLKKGIINSPSIPPLRQVRRHDYDLKRKRRRHGKPVKGQRSNANLQAHRTNMAQDRFKKGASAIVSLAREHSADLILFENLHSLKFSAFDERWMNRQLRDMNRRHIVELVSEQAPEFGITVKDDINPWMTSRICSNCNLPGFRFSMKKKNPYREKLPREKCTDFGYPVWEPGGHLFRCPHCDHRVNADINAAANLANKFFGLGYWNNGLKYDAETKTFTVHTDKKTPPLIFKPRPQFDLWADSVKTRKQLGPDPF

SEQ ID NO: 307 - protein, 743 aa, Planctomycetes bacterium
MSVRSFQARVECDKQTMEHLWRTHKVFNERLPEIIKILFKMKRGECGQNDKQKSLYKSISQSILEANAQNADYLLNSVSIKGWKPGTAKKYRNASFTWADDAAKLSSQGIHVYDKKQVLGDLPGMMSQMVCRQSVEAISGHIELTKKWEKEHNEWLKEKEKWESEDEHKKYLDLREKFEQFEQSIGGKITKRRGRWHLYLKWLSDNPDFAAWRGNKAVINPLSEKAQIRINKAKPNKKNSVERDEFFKANPEMKALDNLHGYYERNFVRRRKTKKNPDGFDHKPTFTLPHPTIHPRWFVFNKPKTNPEGYRKLILPKKAGDLGSLEMRLLTGEKNKGNYPDDWISVKFKADPRLSLIRPVKGRRVVRKGKEQGQTKETDSYEFFDKHLKKWRPAKLSGVKLIFPDKTPKAAYLYFTCDIPDEPLTETAKKIQWLETGDVTKKGKKRKKKVLPHGLVSCAVDLSMRRGTTGFATLCRYENGKIHILRSRNLWVGYKEGKGCHPYRWTEGPDLGHIAKHKREIRILRSKRGKPVKGEESHIDLQKHIDYMGEDRFKKAARTIVNFALNTENAASKNGFYPRADVLLLENLEGLIPDAEKERGINRALAGWNRRHLVERVIEMAKDAGFKRRVFEIPPYGTSQVCSKCGALGRRYSIIRENNRREIRFGYVEKLFACPNCGYCANADHNASVNLNRRFLIEDSFKSYYDWKRLSEKKQKEEIETIESKLMDKLCAMHKISRGSISK

SEQ ID NO: 308 - protein, 1119 aa, Spirochaetes bacterium
MSFTISYPFKLIIKNKDEAKALLDTHQYMNEGVKYYLEKLLMFRQEKIFIGEDETGKRIYIEETEYKKQIEEFYLIKKTELGRNLTLTLDEFKTLMRELYICLVSSSMENKKGFPNAQQASLNIFSPLFDAESKGYILKEENNNISLIHKDYGKILLKRLRDNNLIPIFTKFTDIKKITAKLSPTALDRMIFAQAIEKLLSYESWCKLMIKERFDKEVKIKELENKCENKQERDKIFEILEKYEEERQKTFEQDSGFAKKGKFYITGRMLKGFDEIKEKWLKEKDRSEQNLINILNKYQTDNSKLVGDRNLFEFIIKLENQCLWNGDIDYLKIKRDINKNQIWLDRPEMPRFTMPDFKKHPLWYRYEDPSNSNFRNYKIEVVKDENYITIPLITERNNEYFEENYTFNLAKLKKLSENITFIPKSKNKEFEFIDSNDEEEDKKDQKKSKQYIKYCDTAKNTSYGKSGGIRLYFNRNELENYKDGKKMDSYTVFTLSIRDYKSLFAKEKLQPQIFNTVDNKITSLKIQKKFGNEEQTNFLSYFTQNQITKKDWMDEKTFQNVKELNEGIRVLSVDLGQRFFAAVSCFEIMSEIDNNKLFFNLNDQNHKIIRINDKNYYAKHIYSKTIKLSGEDDDLYKERKINKNYKLSYQERKNKIGIFTRQINKLNQLLKIIRNDEIDKEKFKELIETTKRYVKNTYNDGIIDWNNVDNKILSYENKEDVINLHKELDKKLEIDFKEFIRECRKPIFRSGGLSMQRIDFLEKLNKLKRKWVARTQKSAESIVLTPKFGYKLKEHINELKDNRVKQGVNYILMTALGYIKDNEIKNDSKKKQKEDWVKKNRACQIILMEKLTEYTFAEDRPREENSKLRMWSHRQIFNFLQQKASLWGILVGDVFAPYTSKCLSDNNAPGIRCHQVTKKDLIDNSWFLKIVVKDDAFCDLIEINKENVKNKSIKINDILPLRGGELFASIKDGKLHIVQADINASRNIAKRFLSQINPFRVVLKKDKDETFHLKNEPNYLKNYYSILNFVPTNEELTFFKVEENKDIKPTKRIKMDKHEKESTDEGDDYSKNQIALFRDDSGIFFDKSLWVDGKIFWSVVKNKMTKLLRERNNKKNGSK

SEQ ID NO: 309 - protein, 1447 aa, Verrucomicrobiaceae bacterium
MPLSRIYQGRTNSLIILTPTPQEPWDHKALARFDSPLWRHHALFQDAVNYYQLCLVALASSDGTRPLSKLHEQMKASWDEAKTDTEDSWRVRLARRLGIPAASLFEAALAKVLEGNEAPERARELAGELLLDKIEGDIQQAGRGYWPRFCDPKANPTYDYSATARASASGLTKLAAVIHAENVTEEALKQVAAEMDLSWTVKLQPDKNFVGAEARARLLEAAHHFIKVAESPPTKLAEVLARFPDGLALWQALPEKIAALPEETQVPRNRKASPDLTFATLLFQHFPSLFTAAVLGLSVGKPKSVKAPKVVEKVSARRKANAVTQAVVIEEPEIDFAELGDDPIKLARGERGFVFPAFTSLSFWAVPGPHVPVWKEFDIAAFKEALKTVNQFKLKTSERNALLAEAQRRLDYMDEKTHDWKTGDSDEPGHIPPRLKSDPNFTLIQALTQDEGVSNKATGDQHIPKGVYTGGLRGFYAIKKDWCELWERKADKSQGTPTEEELISIVTDYQRDHVYDVGDVGLFRALCEPRFWPLWQPLTDEQEAERIKAGRAKDMISAYRVWLELQEDVVRLAQPIRFTPAHAENSRRLFMFSDISGSHGAEFGSDGKSLEVSIAYDVDGKLQPVRAKLEFSAPRAARDELEGLSGGSESMRWFQPMMKALDCPEVEMPALEKCAVSLMPDVVKKGGGKWVRLLLNFPATLEPEGLIRHIGKQAMWYKQFNGTYKPRTQQLDTGLHLYWPGLEKAPEAEDAAAWWNREEIRAKGFSVLSVDLGQRDAGAWALLESRSDKAFSRNRQPFIELGEAGGKLWSTALLGLGMLRLPGEDARTGALDDQGKRAVEFHGKAGRNALEAEWQEAREMALLFGGEEAKSRLGPGFDHLSHSKQNEELLRILSRAQSRLARFHRWSCRIHEKPEATGDDVIDYGQVDELLTKTAEAMLENLKALYTNAGGILDSKSKQPLTLVGLRKKLEAQKVEPEKIAAVLKPHAEIIFQRLGTLIPELKQHLRVSLERLANRELPLRHREWVWNEAFEKLEQGNFKKEENPKWIRGQRGLSMARIEQIENLRKRFMSLRRQMSLIPGEQVKQGVEDKGQRQPEPCEDILNKLDRMKQQRVNQTAHLILAQALGLRLRPHLANDAEREEKDIHGEYELIPGRKPVDFIVMEDLSRYLSSQGRAPSENGRLMKWCHRAVLAKLKQMCEPFGIPVLEVPAAYSSRFCALTGVPGFRAVEVHDGNAEDFRWKRLIKKAEKDKSSKDAEAAAMLFDQLHDLNIEAREARKQDKKLPLRTLFAPVAGGPLFIPMVGGGPRQADMNAAINLGLRAIASPTCLRARPKIRAELKDGKHQAMLGNKLEKAAALTLEPPKEPTKELAAQKRTNFFLDEKFVGKFDTAHVTTSGKKLRLSGGMSLWKAIKDGAWQRVKKINDARIAKWKNNPPPEPDPDDEIQF

SEQ ID NO: 310 - RNA, 25 nt, Artificial Sequence
  Synthetic Oligonucleotide
gggaacaaagcugaaguacuuaccc

SEQ ID NO: 311 - DNA, 18 bp, Artificial Sequence
  Synthetic Oligonucleotide
gggtagggcgggttggga

SEQ ID NO: 312 - DNA, 25 bp, Artificial Sequence
  Synthetic Oligonucleotide
  misc_feature (25)..(25): 3' ThioMC3 tag
ttataactattcctaaaaaaaaaaa

SEQ ID NO: 313 - DNA, 26 bp, Artificial Sequence
  Synthetic Oligonucleotide
  misc_feature (1)..(1): 5' ThioMC6 tag
aaaaaaaaaactcccctaataacaat

SEQ ID NO: 314 - RNA, 45 nt, Artificial Sequence
  Synthetic Oligonucleotide
ggguaggaauaguuauaauuucccuuucccauuguuauuagggag

SEQ ID NO: 315 - RNA, 12 nt, Artificial Sequence
  Synthetic Oligonucleotide
  misc_feature (1)..(1): 5' biotin tag
  misc_feature (12)..(12): 3' Iowa black quencher
ucucguacguuc

SEQ ID NO: 316 - RNA, 24 nt, Artificial Sequence
  Synthetic Oligonucleotide
  misc_feature (1)..(1): 5' biotin tag
  misc_feature (24)..(24): 3' Iowa black quencher
ucucguacguucucucguacguuc

SEQ ID NO: 317 - DNA, 66 bp, Artificial Sequence
  Synthetic Oligonucleotide
tgtggttggtgtggttggttcatggtcatattggtttttttttttttttccaaccacagtctctgt

SEQ ID NO: 318 - DNA, 35 bp, Artificial Sequence
  Synthetic Oligonucleotide
ggttggtagtctcgaattgctctctttcactggcc

SEQ ID NO: 319 - DNA, 48 bp, Artificial Sequence
  Synthetic Oligonucleotide
gaaattaatacgactcactatagggggttggttcatggtcatattggt

SEQ ID NO: 320 - DNA, 57 bp, Artificial Sequence
  Synthetic Oligonucleotide
gaaattaatacgactcactatagggggttggtgtggttggttcatggtcatattggt

SEQ ID NO: 321 - DNA, 31 bp, Artificial Sequence
  Synthetic Oligonucleotide
ggccagtgaaagagagcaattcgagactacc

SEQ ID NO: 322 - RNA, 64 nt, Artificial Sequence
  Synthetic Oligonucleotide
gauuuagacuaccccaaaaacgaaggggacuaaaacccagugaaagagagcaauucgagacuac

SEQ ID NO: 323 - RNA, 64 nt, Artificial Sequence
  Synthetic Oligonucleotide
gauuuagacuaccccaaaaacgaaggggacuaaaacaaagagagcaauucgagacuaccaacca

SEQ ID NO: 324 - RNA, 64 nt, Artificial Sequence
  Synthetic Oligonucleotide
gauuuagacuaccccaaaaacgaaggggacuaaaacagacuaccaaccacagagacugugguug

SEQ ID NO: 325 - DNA, 106 bp, Artificial Sequence
  Synthetic Oligonucleotide
gttagatcgcaagcatatcattgcgcttgcgatctaactgctgcgccgccgggaaaatactgtacggttagatcgcatagtctcgaattgctctctttcactggcc

SEQ ID NO: 326 - DNA, 71 bp, Artificial Sequence
  Synthetic Oligonucleotide
gttagatcgcaagcatatcattgcgcttgcgatctaactgctgcgccgccgggaaaatactgtacggttag

SEQ ID NO: 327 - DNA, 35 bp, Artificial Sequence
  Synthetic Oligonucleotide
atcgcatagtctcgaattgctctctttcactggcc

SEQ ID NO: 328 - DNA, 50 bp, Artificial Sequence
  Synthetic Oligonucleotide
gaaattaatacgactcactatagggatcgcaagcatatcattgcgcttgc

SEQ ID NO: 329 - DNA, 31 bp, Artificial Sequence
  Synthetic Oligonucleotide
ggccagtgaaagagagcaattcgagactatg

SEQ ID NO: 330 - RNA, 64 nt, Artificial Sequence
  Synthetic Oligonucleotide
gauuuagacuaccccaaaaacgaaggggacuaaaacccagugaaagagagcaauucgagacuau

SEQ ID NO: 331 - RNA, 64 nt, Artificial Sequence
  Synthetic Oligonucleotide
gauuuagacuaccccaaaaacgaaggggacuaaaacagagcaauucgagacuaugcgaucuaac

SEQ ID NO: 332 - RNA, 64 nt, Artificial Sequence
  Synthetic Oligonucleotide
gauuuagacuaccccaaaaacgaaggggacuaaaacacuaugcgaucuaaccguacaguauuuu

SEQ ID NO: 333 - DNA, 10 bp, Artificial Sequence
  Synthetic Oligonucleotide
tatatatata

SEQ ID NO: 334 - DNA, 15 bp, Artificial Sequence
  Synthetic Oligonucleotide
gtcgtcgtcgtcgtc

SEQ ID NO: 335 - DNA, 47 bp, Artificial Sequence
  Synthetic Primer
aattctaatacgactcactatagggggatcctctagaaatatggatt

SEQ ID NO: 336 - DNA, 22 bp, Artificial Sequence
  Synthetic Oligonucleotide
ctcgtatgttgtgtggaattgt

SEQ ID NO: 337 - DNA, 22 bp, Artificial Sequence
  Synthetic Primer
gtggaattgtgagcggataaac

SEQ ID NO: 338 - DNA, 21 bp, Artificial Sequence
  Synthetic Primer
aacagcaatctactcgacctg

SEQ ID NO: 339 - DNA, 28 bp, Artificial Sequence
  Synthetic Oligonucleotide
  misc_feature (1)..(1): 5' FAM tag
  misc_feature (9)..(10): ZEN quencher
  misc_feature (28)..(28): 3' 3IABkFQ tag
aggaaacagctatgaccatgattacgcc

SEQ ID NO: 340 - DNA, 59 bp, Artificial Sequence
  Synthetic Oligonucleotide
aattctaatacgactcactatagggatcctctagaaatatggattacttggtagaacag

SEQ ID NO: 341 - DNA, 35 bp, Artificial Sequence
  Synthetic Oligonucleotide
gataaacacaggaaacagctatgaccatgattacg

SEQ ID NO: 342 - DNA, 54 bp, Artificial Sequence
  Synthetic Oligonucleotide
aattctaatacgactcactataggccgctgctaatgataggttgctactcacaa

SEQ ID NO: 343 - DNA, 34 bp, Artificial Sequence
  Synthetic Oligonucleotide
tcaatgtcagtcaccactattccatccacaacag

SEQ ID NO: 344 - DNA, 34 bp, Artificial Sequence; identical to SEQ ID NO: 343
  Synthetic Oligonucleotide

SEQ ID NO: 345 - DNA, 30 bp, Artificial Sequence
  Synthetic Oligonucleotide
tgtcaatgtcagtcaccactattccatcca

SEQ ID NO: 346 - DNA, 49 bp, Artificial Sequence
  Synthetic Oligonucleotide
aattctaatacgactcactatagggtccagactcctacgggaggcwgca

SEQ ID NO: 347 - DNA, 52 bp, Artificial Sequence
  Synthetic Oligonucleotide
tttcgctctattctcatcagtttcatgtcctgtgtcattaccgcggctgctg

SEQ ID NO: 348 - DNA, 31 bp, Artificial Sequence
  Synthetic Oligonucleotide
ggtacacttcaggtatatttgaggttcattc

SEQ ID NO: 349 - DNA, 56 bp, Artificial Sequence
  Synthetic Oligonucleotide
gaaattaatacgactcactataggggttgatatgtcagagctttccagagaaataa

SEQ ID NO: 350 - DNA, 31 bp, Artificial Sequence
  Synthetic Oligonucleotide
acactaatattgattccttcagatatggact

SEQ ID NO: 351 - DNA, 55 bp, Artificial Sequence
  Synthetic Oligonucleotide
gaaattaatacgactcactatagggatcgttattcttacgcgttgtcattgaaag

SEQ ID NO: 352 - DNA, 30 bp, Artificial Sequence
  Synthetic Oligonucleotide
gaatctcttgaacccagtaggcagaggttg

SEQ ID NO: 353 - DNA, 57 bp, Artificial Sequence
  Synthetic Oligonucleotide
gaaattaatacgactcactatagggaaaggcctaagtgtccttctaccattattttg

SEQ ID NO: 354 - DNA, 32 bp, Artificial Sequence
  Synthetic Oligonucleotide
tttgtttttgatgttgttgttgtttttgtgtc

SEQ ID NO: 355 - DNA, 57 bp, Artificial Sequence
  Synthetic Oligonucleotide
gaaattaatacgactcactatagggaatgcattcatagccaaattctactggaaata

SEQ ID NO: 356 - DNA, 32 bp, Artificial Sequence
  Synthetic Oligonucleotide
gagtacgtccgcttcaccggctacccctgctc

SEQ ID NO: 357 - DNA, 57 bp, Artificial Sequence
  Synthetic Oligonucleotide
gaaattaatacgactcactatagggatagtcccctcggcgaacatggacccctacaa

SEQ ID NO: 358 - DNA, 57 bp, Artificial Sequence
  Synthetic Oligonucleotide
gaaattaatacgactcactatagggtcatgaagacctcacagtaaaaataggtgatt

SEQ ID NO: 359 - DNA, 32 bp, Artificial Sequence
  Synthetic Oligonucleotide
attcttaccatccacaaaatggatccagacaa

SEQ ID NO: 360 - DNA, 53 bp, Artificial Sequence
  Synthetic Oligonucleotide
gaaattaatacgactcactataggggcagcatgtcaagatcacagattttggg

SEQ ID NO: 361 - DNA, 29 bp, Artificial Sequence
  Synthetic Oligonucleotide
cctccttctgcatggtattctttctcttc

SEQ ID NO: 362 - DNA, 47 bp, Artificial Sequence; identical to SEQ ID NO: 335
  Synthetic Oligonucleotide

SEQ ID NO: 363 - DNA, 22 bp, Artificial Sequence
  Synthetic Oligonucleotide
ctcgtatgttgtgtggaattgt

SEQ ID NO: 364 - DNA, 49 bp, Artificial Sequence
  Synthetic Oligonucleotide
aattctaatacgactcactatagggggatcctctagaaatatggattac

SEQ ID NO: 365 - DNA, 22 bp, Artificial Sequence
  Synthetic Oligonucleotide
aaacacaggaaacagctatgac

SEQ ID NO: 366 - DNA, 49 bp, Artificial Sequence
  Synthetic Oligonucleotide
aattctaatacgactcactataggcctctagaaatatggattacttggt

SEQ ID NO: 367 - DNA, 22 bp, Artificial Sequence
  Synthetic Oligonucleotide
cgtatgttgtgtggaattgtga

SEQ ID NO: 368 - DNA, 60 bp, Artificial Sequence
  Synthetic Oligonucleotide
gaaattaatacgactcactatagggctgtcttgtctctcatggccgctggctggcttttc

SEQ ID NO: 369 - DNA, 33 bp, Artificial Sequence
  Synthetic Oligonucleotide
cgtacacaccgatggagccgccaaagtcctgtt

SEQ ID NO: 370 - DNA, 60 bp, Artificial Sequence
  Synthetic Oligonucleotide
gaaattaatacgactcactatagggagcaaatggaaactggcgaccaacggtttggcgat

SEQ ID NO: 371 - DNA, 32 bp, Artificial Sequence
  Synthetic Oligonucleotide
actgccccgaaacccggcatgtcgagatagga

SEQ ID NO: 372 - RNA, 67 nt, Artificial Sequence
  Synthetic Oligonucleotide
ggggauuuagacuaccccaaaaacgaaggggacuaaaacuagauugcuguucuaccaaguaauccau

SEQ ID NO: 373 - RNA, 28 nt, Artificial Sequence
  Synthetic Oligonucleotide
uagauugcuguucuaccaaguaauccau

SEQ ID NO: 374 - RNA, 67 nt, Artificial Sequence
  Synthetic Oligonucleotide
ggggauuuagacuaccccaaaaacgaaggggacuaaaaccauguagugcgccacgagcaaaaugaug

SEQ ID NO: 375 - RNA, 28 nt, Artificial Sequence
  Synthetic Oligonucleotide
cauguagugcgccacgagcaaaaugaug

SEQ ID NO: 376 - RNA, 67 nt, Artificial Sequence
  Synthetic Oligonucleotide
ggggauuuagacuaccccaaaaacgaaggggacuaaaacugcugccugcagcccugggaucaaguac

SEQ ID NO: 377 - RNA, 28 nt, Artificial Sequence
  Synthetic Oligonucleotide
ugcugccugcagcccugggaucaaguac

SEQ ID NO: 378 - RNA, 67 nt, Artificial Sequence
  Synthetic Oligonucleotide
ggggauuuagacuaccccaaaaacgaaggggacuaaaacacuuuacucccuuccuccccgcugaaag

SEQ ID NO: 379 - RNA, 28 nt, Artificial Sequence
  Synthetic Oligonucleotide
acuuuacucccuuccuccccgcugaaag

SEQ ID NO: 380 - RNA, 67 nt, Artificial Sequence
  Synthetic Oligonucleotide
ggggauuuagacuaccccaaaaacgaaggggacuaaaacaccucaucgccuuccuccccgcugaaag

SEQ ID NO: 381 - RNA, 28 nt, Artificial Sequence
  Synthetic Oligonucleotide
accucaucgccuuccuccccgcugaaag

SEQ ID NO: 382 - RNA, 67 nt, Artificial Sequence
  Synthetic Oligonucleotide
ggggauuuagacuaccccaaaaacgaaggggacuaaaacacuuacugcccuuccucccaacuuaaag

SEQ ID NO: 383 - RNA, 28 nt, Artificial Sequence
  Synthetic Oligonucleotide
acuuacugcccuuccucccaacuuaaag

SEQ ID NO: 384 - RNA, 67 nt, Artificial Sequence
  Synthetic Oligonucleotide
ggggauuuagacuaccccaaaaacgaaggggacuaaaacgaacccggaccuucgucgauggugaaag

SEQ ID NO: 385 - RNA, 28 nt, Artificial Sequence
  Synthetic Oligonucleotide
gaacccggaccuucgucgauggugaaag

SEQ ID NO: 386 - RNA, 67 nt, Artificial Sequence
  Synthetic Oligonucleotide
ggggauuuagacuaccccaaaaacgaaggggacuaaaacuuacacauauguucuucccuaauaacag

SEQ ID NO: 387 - RNA, 28 nt, Artificial Sequence
  Synthetic Oligonucleotide
uuacacauauguucuucccuaauaacag

SEQ ID NO: 388 - RNA, 67 nt, Artificial Sequence
  Synthetic Oligonucleotide
ggggauuuagacuaccccaaaaacgaaggggacuaaaacaugguuccgcgacgagguuggucagcgc

SEQ ID NO: 389 - RNA, 28 nt, Artificial Sequence
  Synthetic Oligonucleotide
augguuccgcgacgagguuggucagcgc

SEQ ID NO: 390 - RNA, 67 nt, Artificial Sequence
  Synthetic Oligonucleotide
ggggauuuagacuaccccaaaaacgaaggggacuaaaaccugccagacauucggugcgagcuggcgg

SEQ ID NO: 391 - RNA, 28 nt, Artificial Sequence
  Synthetic Oligonucleotide
cugccagacauucggugcgagcuggcgg

SEQ ID NO: 392 - RNA, 67 nt, Artificial Sequence
  Synthetic Oligonucleotide
ggggauuuagacuaccccaaaaacgaaggggacuaaaacaagauugcuguucuaccaaguaauccau

SEQ ID NO: 393 - RNA, 28 nt, Artificial Sequence
  Synthetic Oligonucleotide
aagauugcuguucuaccaaguaauccau

SEQ ID NO: 394 - RNA, 67 nt, Artificial Sequence
  Synthetic Oligonucleotide
ggggauuuagacuaccccaaaaacgaaggggacuaaaacuugauugcuguucuaccaaguaauccau

SEQ ID NO: 395 - RNA, 28 nt, Artificial Sequence
  Synthetic Oligonucleotide
uugauugcuguucuaccaaguaauccau

SEQ ID NO: 396 - RNA, 67 nt, Artificial Sequence
  Synthetic Oligonucleotide
ggggauuuagacuaccccaaaaacgaaggggacuaaaacuacauugcuguucuaccaaguaauccau

SEQ ID NO: 397 - RNA, 28 nt, Artificial Sequence
  Synthetic Oligonucleotide
uacauugcuguucuaccaaguaauccau

SEQ ID NO: 398 - RNA, 67 nt, Artificial Sequence
  Synthetic Oligonucleotide
ggggauuuagacuaccccaaaaacgaaggggacuaaaacuaguuugcuguucuaccaaguaauccau

SEQ ID NO: 399 - RNA, 28 nt, Artificial Sequence
  Synthetic Oligonucleotide
uaguuugcuguucuaccaaguaauccau

SEQ ID NO: 400 - RNA, 66 nt, Artificial Sequence
  Synthetic Oligonucleotide
gggauuuagacuaccccaaaaacgaaggggacuaaaacuagaaugcuguucuaccaaguaauccau

SEQ ID NO: 401 - RNA, 28 nt, Artificial Sequence
  Synthetic Oligonucleotide
uagaaugcuguucuaccaaguaauccau

SEQ ID NO: 402 - RNA, 67 nt, Artificial Sequence
  Synthetic Oligonucleotide
ggggauuuagacuaccccaaaaacgaaggggacuaaaacuagauagcuguucuaccaaguaauccau

SEQ ID NO: 403 - RNA, 28 nt, Artificial Sequence
  Synthetic Oligonucleotide
uagauagcuguucuaccaaguaauccau

SEQ ID NO: 404 - RNA, 67 nt, Artificial Sequence
  Synthetic Oligonucleotide
ggggauuuagacuaccccaaaaacgaaggggacuaaaacuagauuccuguucuaccaaguaauccau

SEQ ID NO: 405 - RNA, 28 nt, Artificial Sequence
  Synthetic Oligonucleotide
uagauuccuguucuaccaaguaauccau

SEQ ID NO: 406 - RNA, 67 nt, Artificial Sequence
  Synthetic Oligonucleotide
ggggauuuagacuaccccaaaaacgaaggggacuaaaacuagauugguguucuaccaaguaauccau

SEQ ID NO: 407 - RNA, 28 nt, Artificial Sequence
  Synthetic Oligonucleotide
uagauugguguucuaccaaguaauccau

SEQ ID NO: 408 - RNA, 67 nt, Artificial Sequence
  Synthetic Oligonucleotide
ggggauuuagacuaccccaaaaacgaaggggacuaaaacuagauugcaguucuaccaaguaauccau

SEQ ID NO: 409 - RNA, 28 nt, Artificial Sequence
  Synthetic Oligonucleotide
uagauugcaguucuaccaaguaauccau

SEQ ID NO: 410 - RNA, 67 nt, Artificial Sequence
  Synthetic Oligonucleotide
ggggauuuagacuaccccaaaaacgaaggggacuaaaacuagauugcucuucuaccaaguaauccau

SEQ ID NO: 411 - RNA, 28 nt, Artificial Sequence
  Synthetic Oligonucleotide
uagauugcucuucuaccaaguaauccau

SEQ ID NO: 412 - RNA, 67 nt, Artificial Sequence
  Synthetic Oligonucleotide
ggggauuuagacuaccccaaaaacgaaggggacuaaaacggauacuucaugaugccagcugcuguuc

SEQ ID NO: 413 - RNA, 28 nt, Artificial Sequence
  Synthetic Oligonucleotide
ggauacuucaugaugccagcugcuguuc

SEQ ID NO: 414 - RNA, 67 nt, Artificial Sequence
  Synthetic Oligonucleotide
ggggauuuagacuaccccaaaaacgaaggggacuaaaacggauuguucaugaugccagcugcuguuc

SEQ ID NO: 415 - RNA, 28 nt, Artificial Sequence
  Synthetic Oligonucleotide
ggauuguucaugaugccagcugcuguuc

SEQ ID NO: 416 - RNA, 67 nt, Artificial Sequence
  Synthetic Oligonucleotide
ggggauuuagacuaccccaaaaacgaaggggacuaaaacggguacuucaugaugccagcugccguuc

SEQ ID NO: 417 - RNA, 28 nt, Artificial Sequence
  Synthetic Oligonucleotide
ggguacuucaugaugccagcugccguuc

SEQ ID NO: 418 - RNA, 67 nt, Artificial Sequence
  Synthetic Oligonucleotide
ggggauuuagacuaccccaaaaacgaaggggacuaaaacggguuguucaugaugccagcugccguuc

SEQ ID NO: 419 - RNA, 28 nt, Artificial Sequence
  Synthetic Oligonucleotide
ggguuguucaugaugccagcugccguuc

SEQ ID NO: 420 - RNA, 67 nt, Artificial Sequence
  Synthetic Oligonucleotide
ggggauuuagacuaccccaaaaacgaaggggacuaaaacgguuuaaucccuucugguguguugaugu

SEQ ID NO: 421 - RNA, 28 nt, Artificial Sequence
  Synthetic Oligonucleotide
gguuuaaucccuucugguguguugaugu

SEQ ID NO: 422 - RNA, 67 nt, Artificial Sequence
  Synthetic Oligonucleotide
ggggauuuagacuaccccaaaaacgaaggggacuaaaacgguaaaaucccuucugguguguugaugu

SEQ ID NO: 423 - RNA, 28 nt, Artificial Sequence
  Synthetic Oligonucleotide
gguaaaaucccuucugguguguugaugu

SEQ ID NO: 424 - RNA, 67 nt, Artificial Sequence
  Synthetic Oligonucleotide
ggggauuuagacuaccccaaaaacgaaggggacuaaaacggguuaaucccuucugguguguuuaugu

SEQ ID NO: 425 - RNA, 28 nt, Artificial Sequence
  Synthetic Oligonucleotide
ggguuaaucccuucugguguguuuaugu

SEQ ID NO: 426 - RNA, 67 nt, Artificial Sequence
  Synthetic Oligonucleotide
ggggauuuagacuaccccaaaaacgaaggggacuaaaacgggaaaaucccuucugguguguuuaugu

SEQ ID NO: 427 - RNA, 28 nt, Artificial Sequence
  Synthetic Oligonucleotide
gggaaaaucccuucugguguguuuaugu

SEQ ID NO: 428 - RNA, 62 nt, Artificial Sequence
  Synthetic Oligonucleotide
ggggauuuagacuaccccaaaaacgaaggggacuaaaacggauacuucaugaugccagcugc

SEQ ID NO: 429 - RNA, 23 nt, Artificial Sequence
  Synthetic Oligonucleotide
ggauacuucaugaugccagcugc

SEQ ID NO: 430 - RNA, 62 nt, Artificial Sequence
  Synthetic Oligonucleotide
ggggauuuagacuaccccaaaaacgaaggggacuaaaacggauuguucaugaugccagcugc

SEQ ID NO: 431 - RNA, 23 nt, Artificial Sequence
  Synthetic Oligonucleotide
ggauuguucaugaugccagcugc

SEQ ID NO: 432 - RNA, 62 nt, Artificial Sequence
  Synthetic Oligonucleotide
ggggauuuagacuaccccaaaaacgaaggggacuaaaacggguacuucaugaugccagcugc

SEQ ID NO: 433 - RNA, 23 nt, Artificial Sequence
  Synthetic Oligonucleotide
ggguacuucaugaugccagcugc

SEQ ID NO: 434 - RNA, 62 nt, Artificial Sequence
  Synthetic Oligonucleotide
ggggauuuagacuaccccaaaaacgaaggggacuaaaacggguuguucaugaugccagcugc

SEQ ID NO: 435 - RNA, 23 nt, Artificial Sequence
  Synthetic Oligonucleotide
ggguuguucaugaugccagcugc

SEQ ID NO: 436 - RNA, 67 nt, Artificial Sequence
  Synthetic Oligonucleotide
ggggauuuagacuaccccaaaaacgaaggggacuaaaacuacuacgcuucagccuacugcaaaucca

SEQ ID NO: 437 - RNA, 28 nt, Artificial Sequence
  Synthetic Oligonucleotide
uacuacgcuucagccuacugcaaaucca

SEQ ID NO: 438 - RNA, 67 nt, Artificial Sequence
  Synthetic Oligonucleotide
ggggauuuagacuaccccaaaaacgaaggggacuaaaacuauuacgcuucagccuacugcaaaucca

SEQ ID NO: 439 - RNA, 28 nt, Artificial Sequence
  Synthetic Oligonucleotide
uauuacgcuucagccuacugcaaaucca

SEQ ID NO: 440 - RNA, 67 nt, Artificial Sequence
  Synthetic Oligonucleotide
ggggauuuagacuaccccaaaaacgaaggggacuaaaacgacagaaauguccuuuucccaauccuau

SEQ ID NO: 441 - RNA, 28 nt, Artificial Sequence
  Synthetic Oligonucleotide
gacagaaauguccuuuucccaauccuau

SEQ ID NO: 442 - RNA, 67 nt, Artificial Sequence
  Synthetic Oligonucleotide
ggggauuuagacuaccccaaaaacgaaggggacuaaaacgauagaaauguccuuuucccaauccuau

SEQ ID NO: 443 - RNA, 28 nt, Artificial Sequence
  Synthetic Oligonucleotide
gauagaaauguccuuuucccaauccuau

SEQ ID NO: 444 - RNA, 67 nt, Artificial Sequence
  Synthetic Oligonucleotide
ggggauuuagacuaccccaaaaacgaaggggacuaaaacaccgacucuuuuuuguauuuccaguaga

SEQ ID NO: 445 - RNA, 28 nt, Artificial Sequence
  Synthetic Oligonucleotide
accgacucuuuuuuguauuuccaguaga

SEQ ID NO: 446 - RNA, 67 nt, Artificial Sequence
  Synthetic Oligonucleotide
ggggauuuagacuaccccaaaaacgaaggggacuaaaacacugacucuuuuuuguauuuccaguaga

SEQ ID NO: 447 - RNA, 28 nt, Artificial Sequence
  Synthetic Oligonucleotide
acugacucuuuuuuguauuuccaguaga

SEQ ID NO: 448 - RNA, 67 nt, Artificial Sequence
  Synthetic Oligonucleotide
ggggauuuagacuaccccaaaaacgaaggggacuaaaaccuacaccuucuaccaccaccuccgccag

SEQ ID NO: 449 - RNA, 28 nt, Artificial Sequence
  Synthetic Oligonucleotide
cuacaccuucuaccaccaccuccgccag

SEQ ID NO: 450 - RNA, 67 nt, Artificial Sequence
  Synthetic Oligonucleotide
ggggauuuagacuaccccaaaaacgaaggggacuaaaaccugcaccuucuaccaccaccuccgccag

SEQ ID NO: 451 - RNA, 28 nt, Artificial Sequence
  Synthetic Oligonucleotide
cugcaccuucuaccaccaccuccgccag

SEQ ID NO: 452 - RNA, 67 nt, Artificial Sequence
  Synthetic Oligonucleotide
ggggauuuagacuaccccaaaaacgaaggggacuaaaacgagagcaacaggaagcaggauuccaagu

SEQ ID NO: 453 - RNA, 28 nt, Artificial Sequence
  Synthetic Oligonucleotide
gagagcaacaggaagcaggauuccaagu

SEQ ID NO: 454 - RNA, 67 nt, Artificial Sequence
  Synthetic Oligonucleotide
ggggauuuagacuaccccaaaaacgaaggggacuaaaacgaaagcaacaggaagcaggauuccaagu

SEQ ID NO: 455 - RNA, 67 nt, Artificial Sequence
  Synthetic Oligonucleotide
ggggauuuagacuaccccaaaaacgaaggggacuaaaacccaggccaaaaucugugaucuugacaug

SEQ ID NO: 456 - RNA, 28 nt, Artificial Sequence
  Synthetic Oligonucleotide
ccaggccaaaaucugugaucuugacaug

SEQ ID NO: 457 - RNA, 67 nt, Artificial Sequence
  Synthetic Oligonucleotide
ggggauuuagacuaccccaaaaacgaaggggacuaaaaccccggccaaaaucugugaucuugacaug

SEQ ID NO: 458 - RNA, 28 nt, Artificial Sequence
  Synthetic Oligonucleotide
cccggccaaaaucugugaucuugacaug

SEQ ID NO: 459 - RNA, 67 nt, Artificial Sequence
  Synthetic Oligonucleotide
ggggauuuagacuaccccaaaaacgaaggggacuaaaacucaguguagcuagaccaaaaucaccuau

SEQ ID NO: 460 - RNA, 28 nt, Artificial Sequence
  Synthetic Oligonucleotide
ucaguguagcuagaccaaaaucaccuau

SEQ ID NO: 461 - RNA, 67 nt, Artificial Sequence
  Synthetic Oligonucleotide
ggggauuuagacuaccccaaaaacgaaggggacuaaaacucuguguagcuagaccaaaaucaccuau

SEQ ID NO: 462 - RNA, 28 nt, Artificial Sequence
  Synthetic Oligonucleotide
ucuguguagcuagaccaaaaucaccuau

SEQ ID NO: 463 - RNA, 62 nt, Artificial Sequence
  Synthetic Oligonucleotide
ggggauuuagacuaccccaaaaacgaaggggacuaaaacaagauugcuguucuaccaaguaa

SEQ ID NO: 464 - RNA, 23 nt, Artificial Sequence
  Synthetic Oligonucleotide
aagauugcuguucuaccaaguaa

SEQ ID NO: 465 - RNA, 62 nt, Artificial Sequence
  Synthetic Oligonucleotide
ggggauuuagacuaccccaaaaacgaaggggacuaaaacuugauugcuguucuaccaaguaa

SEQ ID NO: 466 - RNA, 23 nt, Artificial Sequence
  Synthetic Oligonucleotide
uugauugcuguucuaccaaguaa

SEQ ID NO: 467 - RNA, 62 nt, Artificial Sequence
  Synthetic Oligonucleotide
ggggauuuagacuaccccaaaaacgaaggggacuaaaacuaguuugcuguucuaccaaguaa

SEQ ID NO: 468 - RNA, 23 nt, Artificial Sequence
  Synthetic Oligonucleotide
uaguuugcuguucuaccaaguaa

SEQ ID NO: 469 - RNA, 62 nt, Artificial Sequence
  Synthetic Oligonucleotide
ggggauuuagacuaccccaaaaacgaaggggacuaaaacuagaaugcuguucuaccaaguaa

SEQ ID NO: 470 - RNA, 23 nt, Artificial Sequence
  Synthetic Oligonucleotide
uagaaugcuguucuaccaaguaa

SEQ ID NO: 471 - RNA, 62 nt, Artificial Sequence
  Synthetic Oligonucleotide
ggggauuuagacuaccccaaaaacgaaggggacuaaaacuagauagcuguucuaccaaguaa

SEQ ID NO: 472 - RNA, 23 nt, Artificial Sequence
  Synthetic oligonucleotide
uagauagcuguucuaccaaguaa

SEQ ID NO: 473 - RNA, 62 nt, Artificial Sequence
  Synthetic Oligonucleotide
ggggauuuagacuaccccaaaaacgaaggggacuaaaacuagauuccuguucuaccaaguaa

SEQ ID NO: 474 - RNA, 23 nt, Artificial Sequence
  Synthetic Oligonucleotide
uagauuccuguucuaccaaguaa

SEQ ID NO: 475 - RNA, 59 nt, Artificial Sequence
  Synthetic Oligonucleotide
ggggauuuagacuaccccaaaaacgaaggggacuaaaacaagauugcuguucuaccaag

SEQ ID NO: 476 - RNA, 20 nt, Artificial Sequence
  Synthetic Oligonucleotide
aagauugcuguucuaccaag

SEQ ID NO: 477 - RNA, 59 nt, Artificial Sequence
  Synthetic Oligonucleotide
ggggauuuagacuaccccaaaaacgaaggggacuaaaacuugauugcuguucuaccaag

SEQ ID NO: 478 - RNA, 20 nt, Artificial Sequence
  Synthetic Oligonucleotide
uugauugcuguucuaccaag

SEQ ID NO: 479 - RNA, 59 nt, Artificial Sequence
  Synthetic Oligonucleotide
ggggauuuagacuaccccaaaaacgaaggggacuaaaacuaguuugcuguucuaccaag

SEQ ID NO: 480 - RNA, 20 nt, Artificial Sequence
  Synthetic Oligonucleotide
uaguuugcuguucuaccaag

SEQ ID NO: 481 - RNA, 59 nt, Artificial Sequence
  Synthetic Oligonucleotide
ggggauuuagacuaccccaaaaacgaaggggacuaaaacuagaaugcuguucuaccaag

SEQ ID NO: 482 - RNA, 20 nt, Artificial Sequence
  Synthetic Oligonucleotide
uagaaugcuguucuaccaag

SEQ ID NO: 483 - RNA, 59 nt, Artificial Sequence
  Synthetic Oligonucleotide
ggggauuuagacuaccccaaaaacgaaggggacuaaaacuagauagcuguucuaccaag

SEQ ID NO: 484 - RNA, 20 nt, Artificial Sequence
  Synthetic Oligonucleotide
uagauagcuguucuaccaag

SEQ ID NO: 485 - RNA, 59 nt, Artificial Sequence
  Synthetic Oligonucleotide
ggggauuuagacuaccccaaaaacgaaggggacuaaaacuagauuccuguucuaccaag

SEQ ID NO: 486 - RNA, 20 nt, Artificial Sequence
  Synthetic Oligonucleotide
uagauuccuguucuaccaag

SEQ ID NO: 487 - RNA, 67 nt, Artificial Sequence
  Synthetic Oligonucleotide
ggggauuuagacuaccccaaaaacgaaggggacuaaaaccuagauugcuguucuaccaaguaaucca

SEQ ID NO: 488 - RNA, 28 nt, Artificial Sequence
  Synthetic Oligonucleotide
cuagauugcuguucuaccaaguaaucca

SEQ ID NO: 489 - RNA, 67 nt, Artificial Sequence
  Synthetic Oligonucleotide
ggggauuuagacuaccccaaaaacgaaggggacuaaaacgaagauugcuguucuaccaaguaaucca

SEQ ID NO: 490 - RNA, 28 nt, Artificial Sequence
  Synthetic Oligonucleotide
gaagauugcuguucuaccaaguaaucca

SEQ ID NO: 491 - RNA, 67 nt, Artificial Sequence
  Synthetic Oligonucleotide
ggggauuuagacuaccccaaaaacgaaggggacuaaaacguugauugcuguucuaccaaguaaucca

SEQ ID NO: 492 - RNA, 28 nt, Artificial Sequence
  Synthetic Oligonucleotide
guugauugcuguucuaccaaguaaucca

SEQ ID NO: 493 - RNA, 67 nt, Artificial Sequence
  Synthetic Oligonucleotide
ggggauuuagacuaccccaaaaacgaaggggacuaaaacguaguuugcuguucuaccaaguaaucca

SEQ ID NO: 494 - RNA, 28 nt, Artificial Sequence
  Synthetic Oligonucleotide
guaguuugcuguucuaccaaguaaucca

SEQ ID NO: 495 - RNA, 67 nt, Artificial Sequence
  Synthetic Oligonucleotide
ggggauuuagacuaccccaaaaacgaaggggacuaaaacguagaaugcuguucuaccaaguaaucca

SEQ ID NO: 496 - RNA, 28 nt, Artificial Sequence
  Synthetic Oligonucleotide
guagaaugcuguucuaccaaguaaucca

SEQ ID NO: 497 - RNA, 67 nt, Artificial Sequence
  Synthetic Oligonucleotide
ggggauuuagacuaccccaaaaacgaaggggacuaaaacguagauagcuguucuaccaaguaaucca

SEQ ID NO: 498 - RNA, 28 nt, Artificial Sequence
  Synthetic Oligonucleotide
guagauagcuguucuaccaaguaaucca

SEQ ID NO: 499 - RNA, 67 nt, Artificial Sequence
  Synthetic Oligonucleotide
ggggauuuagacuaccccaaaaacgaaggggacuaaaacacuagauugcuguucuaccaaguaaucc

SEQ ID NO: 500 - RNA, 28 nt, Artificial Sequence
  Synthetic Oligonucleotide
acuagauugcuguucuaccaaguaaucc

SEQ ID NO: 501 - RNA, 67 nt, Artificial Sequence
  Synthetic Oligonucleotide
ggggauuuagacuaccccaaaaacgaaggggacuaaaacagaagauugcuguucuaccaaguaaucc

SEQ ID NO: 502 - RNA, 28 nt, Artificial Sequence
  Synthetic Oligonucleotide
agaagauugcuguucuaccaaguaaucc

SEQ ID NO: 503 - RNA, 67 nt, Artificial Sequence
  Synthetic Oligonucleotide
ggggauuuagacuaccccaaaaacgaaggggacuaaaacaguugauugcuguucuaccaaguaaucc

SEQ ID NO: 504 - RNA, 28 nt, Artificial Sequence
  Synthetic Oligonucleotide
aguugauugcuguucuaccaaguaaucc

SEQ ID NO: 505 - RNA, 67 nt, Artificial Sequence
  Synthetic Oligonucleotide
ggggauuuagacuaccccaaaaacgaaggggacuaaaacaguaguuugcuguucuaccaaguaaucc

SEQ ID NO: 506 - RNA, 28 nt, Artificial Sequence
  Synthetic Oligonucleotide
aguaguuugcuguucuaccaaguaaucc

SEQ ID NO: 507 - RNA, 67 nt, Artificial Sequence
  Synthetic Oligonucleotide
ggggauuuagacuaccccaaaaacgaaggggacuaaaacaguagaaugcuguucuaccaaguaaucc

SEQ ID NO: 508 - RNA, 28 nt, Artificial Sequence
  Synthetic Oligonucleotide
aguagaaugcuguucuaccaaguaaucc

SEQ ID NO: 509 - RNA, 67 nt, Artificial Sequence
  Synthetic Oligonucleotide
ggggauuuagacuaccccaaaaacgaaggggacuaaaacaguagauagcuguucuaccaaguaaucc

SEQ ID NO: 510 - RNA, 28 nt, Artificial Sequence
  Synthetic Oligonucleotide
aguagauagcuguucuaccaaguaaucc

SEQ ID NO: 511 - RNA, 67 nt, Artificial Sequence
  Synthetic Oligonucleotide
ggggauuuagacuaccccaaaaacgaaggggacuaaaacgacuagauugcuguucuaccaaguaauc

SEQ ID NO: 512 - RNA, 28 nt, Artificial Sequence
  Synthetic Oligonucleotide
gacuagauugcuguucuaccaaguaauc

SEQ ID NO: 513 - RNA, 67 nt, Artificial Sequence
  Synthetic Oligonucleotide
ggggauuuagacuaccccaaaaacgaaggggacuaaaacgagaagauugcuguucuaccaaguaauc

SEQ ID NO: 514 - RNA, 28 nt, Artificial Sequence
  Synthetic Oligonucleotide
gagaagauugcuguucuaccaaguaauc

SEQ ID NO: 515 - RNA, 67 nt, Artificial Sequence
  Synthetic Oligonucleotide
ggggauuuagacuaccccaaaaacgaaggggacuaaaacgaguugauugcuguucuaccaaguaauc

SEQ ID NO: 516 - RNA, 28 nt, Artificial Sequence
  Synthetic Oligonucleotide
gaguugauugcuguucuaccaaguaauc

SEQ ID NO: 517 - RNA, 67 nt, Artificial Sequence
  Synthetic Oligonucleotide
ggggauuuagacuaccccaaaaacgaaggggacuaaaacgaguaguuugcuguucuaccaaguaauc

SEQ ID NO: 518 - RNA, 28 nt, Artificial Sequence
  Synthetic Oligonucleotide
gaguaguuugcuguucuaccaaguaauc

SEQ ID NO: 519 - RNA, 67 nt, Artificial Sequence
  Synthetic Oligonucleotide
ggggauuuagacuaccccaaaaacgaaggggacuaaaacgaguagaaugcuguucuaccaaguaauc

SEQ ID NO: 520 - RNA, 28 nt, Artificial Sequence
  Synthetic Oligonucleotide
gaguagaaugcuguucuaccaaguaauc

SEQ ID NO: 521 - RNA, 67 nt, Artificial Sequence
  Synthetic Oligonucleotide
ggggauuuagacuaccccaaaaacgaaggggacuaaaacgaguagauagcuguucuaccaaguaauc

SEQ ID NO: 522 - RNA, 28 nt, Artificial Sequence
  Synthetic Oligonucleotide
gaguagauagcuguucuaccaaguaauc

SEQ ID NO: 523 - RNA, 176 nt, Artificial Sequence
  Synthetic Oligonucleotide
gggggccagugaauucgagcucgguacccggggauccucuagaaauauggauuacuugguagaacagcaaucuacucgaccugcaggcaugcaagcuuggcguaaucauggucauagcuguuuccuguguuuauccgcucacaauuccacacaacauacgagccggaagcauaaag

SEQ ID NO: 524 - RNA, 176 nt, Artificial Sequence
  Synthetic Oligonucleotide
gggggccagugaauucgagcucgguacccggggauccucuagaaauauggauuacuugguagaacagcaaucuagucgaccugcaggcaugcaagcuuggcguaaucauggucauagcuguuuccuguguuuauccgcucacaauuccacacaacauacgagccggaagcauaaag

SEQ ID NO: 525 - RNA, 176 nt, Artificial Sequence
  Synthetic Oligonucleotide
gggggccagugaauucgagcucgguacccggggauccucuagaaauauggauuacuugguagaacagcaaucuaaucgaccugcaggcaugcaagcuuggcguaaucauggucauagcuguuuccuguguuuauccgcucacaauuccacacaacauacgagccggaagcauaaag

SEQ ID NO: 526 - RNA, 176 nt, Artificial Sequence
  Synthetic Oligonucleotide
gggggccagugaauucgagcucgguacccggggauccucuagaaauauggauuacuugguagaacagcaaucuauucgaccugcaggcaugcaagcuuggcguaaucauggucauagcuguuuccuguguuuauccgcucacaauuccacacaacauacgagccggaagcauaaag

SEQ ID NO: 527 - DNA, 173 bp, Artificial Sequence; identical to SEQ ID NO: 128
  Synthetic Oligonucleotide

SEQ ID NO: 528 - DNA, 189 bp, Artificial Sequence
  Synthetic Oligonucleotide
gagtacgtccgcttcaccggctacccctgctcctggaccttctaccaccacctccgccaggagatcctccaggagttcaccctgcacgaccacgtgcgggaggaggcccagaagttcctgcggggcctgcaggtgaacgggagccggccgggcacctttgtaggggtccatgttcgccgaggggactat

SEQ ID NO: 529 - RNA, 334 nt, Artificial Sequence
  Synthetic Oligonucleotide
agcuggaguguuguuugguaugggcaaagggaugccauucuacgcaugggacuuuggagucccgcugcuaaugauagguugcuacucacaauuaacaccccugacccuaauaguggccaucauuuugcucguggcgcacuacauguacuugaucccagggcugcaggcagcagcugcgcgugcugcccagaagagaacggcagcuggcaucaugaagaacccuguuguggauggaauaguggugacugacauugacacaaugacaauugacccccaaguggagaaaaagaugggacaggugcuacucauagcaguagccgucuccagcgccaua

SEQ ID NO: 530 - RNA, 334 nt, Artificial Sequence
  Synthetic Oligonucleotide
ggcagcuauauugaugggacuugacaagggauggccaauaucgaagauggacauaggaguuccacuucucgccuuagggugcuauucccaggugaacccauugacacugacagcggcgguguugauguuaguggcucauuaugccauaauuggaccaggacugcaagcaaaggccacuagagaagcucaaaaaaggacagcggccggaauaaugaaaaauccaaccguagacgggauuguugcaauagacuuggauccugugguuuaugauacaaaauuugaaaaacagcuaggccaaauaauguuacugauacuuuguacaucacagauccuc

SEQ ID NO: 531 - RNA, 337 nt, Artificial Sequence
  Synthetic Oligonucleotide
gggagcuggaguguuguuugguaugggcaaagggaugccauucuacgcaugggacuuuggagucccgcugcuaaugauagguugcuacucacaauuaacaccccugacccuaauaguggccaucauuuugcucguggcgcacuacauguacuugaucccagggcugcaggcagcagcugcgcgugcugcccagaagagaacggcagcuggcaucaugaagaacccuguuguggauggaauaguggugacugacauugacacaaugacaauugacccccaaguggagaaaaagaugggacaggugcuacucauagcaguagccgucuccagcgccaua

SEQ ID NO: 532 - RNA, 173 nt, Artificial Sequence
  Synthetic Oligonucleotide
gggaaccuugauaguggcuaucauucugcuuguggcacacuauauguacuugaucccaggccuacaggcagcagcagcgcgugcugcccagaagagaacagcagcuggcaucaugaagaaucccguuguggauggaauagugguaacugacauugacacaaugacaauugacc

SEQ ID NO: 533 - RNA, 173 nt, Artificial Sequence
  Synthetic Oligonucleotide
ggggacccuaauaguggccaucauuuugcucguggcgcacuacauguacuugaucccagggcugcaggcagcagcugcgcgugcugcccagaagagaacggcagcuggcaucaugaagaacccuguuguggauggaauaguggugacugacauugacacaaugacaauugacc

SEQ ID NO: 534 - RNA, 173 nt, Artificial Sequence
  Synthetic Oligonucleotide
gggaguacauauucaggggccaaccucucaacaaugacgaagaccaugcucacuggacagaagcaaaaaugcugcuggacaacaucaacacaccagaagggauuauaccagcucucuuugaaccagaaagggagaagucagccgccauagacggugaauaccgccugaagggu

SEQ ID NO: 535 - RNA, 173 nt, Artificial Sequence
  Synthetic Oligonucleotide
gggaguacauuuacaugggacagccuucaaacaacgaugaggaucacgcucauuggacagaagcaaaaaugcuccuugacaacauaaacacaccagaagggauuaucccagcccucuuugagccggagagaggaaaaagugcagcaauagacggggaauacagacugcggggu

SEQ ID NO: 536 - RNA, 176 nt, Artificial Sequence
  Synthetic Oligonucleotide
gggggccagugaauucgagcucgguacccggggauccucuagaaauauggauuacuugguagaacagcaauguacucgaccugcaggcaugcaagcuuggcguaaucauggucauagcuguuuccuguguuuauccgcucacaauuccacacaacauacgagccggaagcauaaag

SEQ ID NO: 537 - RNA, 176 nt, Artificial Sequence
  Synthetic Oligonucleotide
gggggccagugaauucgagcucgguacccggggauccucuagaaauauggauuacuugguagaacagcuauguacucgaccugcaggcaugcaagcuuggcguaaucauggucauagcuguuuccuguguuuauccgcucacaauuccacacaacauacgagccggaagcauaaag

SEQ ID NO: 538 - RNA, 20 nt, Artificial Sequence
  Synthetic Oligonucleotide
uggguuggguuggguuggga

SEQ ID NO: 539 - RNA, 23 nt, Artificial Sequence
  Synthetic Oligonucleotide
uggguuuggguuuggguuuggga

SEQ ID NO: 540 - DNA, 66 bp, Artificial Sequence
  Synthetic Oligonucleotide
gatttagactaccccaaaaacgaaggggactaaaacctaccaagtaatccatatttctagaggatc

SEQ ID NO: 541 - DNA, 30 bp, Artificial Sequence
  Synthetic Oligonucleotide
ctaccaagtaatccatatttctagaggatc

SEQ ID NO: 542 - DNA, 36 bp, Artificial Sequence
  Synthetic Oligonucleotide
gatttagactaccccaaaaacgaaggggactaaaac

SEQ ID NO: 543 - DNA, 66 bp, Bergeyella zoohelcum
ctaccaagtaatccatatttctagaggatcgttggaactgctctcattttggagggtaatcacaac

SEQ ID NO: 544 - DNA, 30 bp, Bergeyella zoohelcum; identical to SEQ ID NO: 541

SEQ ID NO: 545 - DNA, 36 bp, Bergeyella zoohelcum
gttggaactgctctcattttggagggtaatcacaac

SEQ ID NO: 546 - DNA, 66 bp, Prevotella intermedia
ctaccaagtaatccatatttctagaggatcgttgcatctgcctgctgtttgcaaggtaaaaacaac

SEQ ID NO: 547 - DNA, 30 bp, Prevotella intermedia; identical to SEQ ID NO: 541

SEQ ID NO: 548 - DNA, 36 bp, Prevotella intermedia
gttgcatctgcctgctgtttgcaaggtaaaaacaac

SEQ ID NO: 549 - DNA, 66 bp, Prevotella buccae
ctaccaagtaatccatatttctagaggatcgttgcatctgccttctttttgaaaggtaaaaacaac

SEQ ID NO: 550 - DNA, 30 bp, Prevotella buccae; identical to SEQ ID NO: 541

SEQ ID NO: 551 - DNA, 36 bp, Prevotella buccae
gttgcatctgccttctttttgaaaggtaaaaacaac

SEQ ID NO: 552 - DNA, 66 bp, Alistipes species
ctaccaagtaatccatatttctagaggatcgctgttatatccttacctttgtaagggaagtacagc

SEQ ID NO: 553 - DNA, 30 bp, Alistipes species; identical to SEQ ID NO: 541

SEQ ID NO: 554 - DNA, 36 bp, Alistipes species
gctgttatatccttacctttgtaagggaagtacagc

SEQ ID NO: 555 - DNA, 66 bp, Prevotella species
ctaccaagtaatccatatttctagaggatcgttgtagaagcttatcgtttggataggtatgacaac

SEQ ID NO: 556 - DNA, 30 bp, Prevotella species; identical to SEQ ID NO: 541

SEQ ID NO: 557 - DNA, 36 bp, Prevotella species
gttgtagaagcttatcgtttggataggtatgacaac

SEQ ID NO: 558 - DNA, 66 bp, Riemerella anatipestifer
ctaccaagtaatccatatttctagaggatcgttgggactgctctcactttgaagggtattcacaac

SEQ ID NO: 559 - DNA, 30 bp, Riemerella anatipestifer; identical to SEQ ID NO: 541

SEQ ID NO: 560 - DNA, 36 bp, Riemerella anatipestifer
gttgggactgctctcactttgaagggtattcacaac

SEQ ID NO: 561 - DNA, 66 bp, Prevotella aurantiaca
ctaccaagtaatccatatttctagaggatcgttgtatctgccttctgtttgaaaggtaaaaacaac

SEQ ID NO: 562 - DNA, 30 bp, Prevotella aurantiaca; identical to SEQ ID NO: 541

SEQ ID NO: 563 - DNA, 36 bp, Prevotella aurantiaca
gttgtatctgccttctgtttgaaaggtaaaaacaac

SEQ ID NO: 564 - DNA, 66 bp, Prevotella saccharolytica
ctaccaagtaatccatatttctagaggatcgttgtgtctacctcctttttgagaggtaaaaacagc

SEQ ID NO: 565 - DNA, 30 bp, Prevotella saccharolytica; identical to SEQ ID NO: 541

SEQ ID NO: 566 - DNA, 36 bp, Prevotella saccharolytica
gttgtgtctacctcctttttgagaggtaaaaacagc

SEQ ID NO: 567 - DNA, 66 bp, Prevotella intermedia; identical to SEQ ID NO: 546

SEQ ID NO: 568 - DNA, 30 bp, Prevotella intermedia; identical to SEQ ID NO: 541

SEQ ID NO: 569 - DNA, 36 bp, Prevotella intermedia; identical to SEQ ID NO: 548

SEQ ID NO: 570 - DNA, 66 bp, Capnocytophaga canimorsus; identical to SEQ ID NO: 543

SEQ ID NO: 571 - DNA, 30 bp, Capnocytophaga canimorsus; identical to SEQ ID NO: 541

SEQ ID NO: 572 - DNA, 36 bp, Capnocytophaga canimorsus; identical to SEQ ID NO: 545

SEQ ID NO: 573 - DNA, 66 bp, Porphyromonas gulae
ctaccaagtaatccatatttctagaggatcgttggatctaccctctatttgaagggtacacacaac

SEQ ID NO: 574 - DNA, 30 bp, Porphyromonas gulae; identical to SEQ ID NO: 541

SEQ ID NO: 575 - DNA, 36 bp, Porphyromonas gulae
gttggatctaccctctatttgaagggtacacacaac

SEQ ID NO: 576 - DNA, 66 bp, Prevotella species
ctaccaagtaatccatatttctagaggatcgttgtggaaggtccagttttgaggggctattacaac

SEQ ID NO: 577 - DNA, 30 bp, Prevotella species; identical to SEQ ID NO: 541

SEQ ID NO: 578 - DNA, 36 bp, Prevotella species
gttgtggaaggtccagttttgaggggctattacaac

SEQ ID NO: 579 - DNA, 66 bp, Porphyromonas gingivalis
ctaccaagtaatccatatttctagaggatcgttggatctaccctctattcgaagggtacacacaac

SEQ ID NO: 580 - DNA, 30 bp, Porphyromonas gingivalis; identical to SEQ ID NO: 541

SEQ ID NO: 581 - DNA, 36 bp, Porphyromonas gingivalis
gttggatctaccctctattcgaagggtacacacaac

SEQ ID NO: 582 - DNA, 66 bp, Prevotella intermedia; identical to SEQ ID NO: 546

SEQ ID NO: 583 - DNA, 30 bp, Prevotella intermedia; identical to SEQ ID NO: 541

SEQ ID NO: 584 - DNA, 36 bp, Prevotella intermedia; identical to SEQ ID NO: 548

SEQ ID NO: 585 - DNA, 64 bp, Dengue virus
gatttagactaccccaaaaacgaaggggactaaaactgcttctgtccagtgagcatggtcttcg

SEQ ID NO: 586 - DNA, 28 bp, Dengue virus
tgcttctgtccagtgagcatggtcttcg

SEQ ID NO: 587 - DNA, 36 bp, Dengue virus; identical to SEQ ID NO: 542

SEQ ID NO: 588 - DNA, 66 bp, Dengue virus
tttgcttctgtccagtgagcatggtcttcggttgtagaagcttatcgtttggataggtatgacaac

SEQ ID NO: 589 - DNA, 30 bp, Dengue virus
tttgcttctgtccagtgagcatggtcttcg

SEQ ID NO: 590 - DNA, 36 bp, Dengue virus; identical to SEQ ID NO: 557

SEQ ID NO: 591 - DNA, 53 bp, Dengue virus
gaccaccccaaaaatgaaggggactaaaacatgcttctgtccagtgagcatgg

SEQ ID NO: 592 - DNA, 22 bp, Leptotrichia buccalis
tgcttctgtccagtgagcatgg

SEQ ID NO: 593 - DNA, 31 bp, Dengue virus
gaccaccccaaaaatgaaggggactaaaaca

SEQ ID NO: 594 - DNA, 51 bp, Dengue virus
gaccaccccaaaaatgaaggggactaaaacatgcttctgtccagtgagcat

SEQ ID NO: 595 - DNA, 20 bp, Leptotrichia buccalis
tgcttctgtccagtgagcat

SEQ ID NO: 596 - DNA, 31 bp, Dengue virus; identical to SEQ ID NO: 593

SEQ ID NO: 597 - DNA, 49 bp, Dengue virus
gaccaccccaaaaatgaaggggactaaaacatgcttctgtccagtgagc

SEQ ID NO: 598 - DNA, 18 bp, Leptotrichia buccalis
tgcttctgtccagtgagc

SEQ ID NO: 599 - DNA, 31 bp, Dengue virus; identical to SEQ ID NO: 593

SEQ ID NO: 600 - DNA, 70 bp, Capnocytophaga canimorsus
tgttctaccaagtaatccatatttctagaggatcgttggaactgctctcattttggagggtaatcacaac

SEQ ID NO: 601 - DNA, 34 bp, Capnocytophaga canimorsus
tgttctaccaagtaatccatatttctagaggatc

SEQ ID NO: 602 - DNA, 36 bp, Capnocytophaga canimorsus; identical to SEQ ID NO: 545

SEQ ID NO: 603 - DNA, 69 bp, Capnocytophaga canimorsus
gttctaccaagtaatccatatttctagaggatcgttggaactgctctcattttggagggtaatcacaac

SEQ ID NO: 604 - DNA, 33 bp, Capnocytophaga canimorsus
gttctaccaagtaatccatatttctagaggatc

SEQ ID NO: 605 - DNA, 36 bp, Capnocytophaga canimorsus; identical to SEQ ID NO: 545

SEQ ID NO: 606 - DNA, 68 bp, Capnocytophaga canimorsus
ttctaccaagtaatccatatttctagaggatcgttggaactgctctcattttggagggtaatcacaac

SEQ ID NO: 607 - DNA, 32 bp, Capnocytophaga canimorsus
ttctaccaagtaatccatatttctagaggatc

SEQ ID NO: 608 - DNA, 36 bp, Capnocytophaga canimorsus; identical to SEQ ID NO: 545

SEQ ID NO: 609 - DNA, 67 bp, Capnocytophaga canimorsus
tctaccaagtaatccatatttctagaggatcgttggaactgctctcattttggagggtaatcacaac

SEQ ID NO: 610 - DNA, 31 bp, Capnocytophaga canimorsus
tctaccaagtaatccatatttctagaggatc

SEQ ID NO: 611 - DNA, 36 bp, Capnocytophaga canimorsus; identical to SEQ ID NO: 545

SEQ ID NO: 612 - DNA, 66 bp, Capnocytophaga canimorsus; identical to SEQ ID NO: 543

SEQ ID NO: 613 - DNA, 30 bp, Capnocytophaga canimorsus; identical to SEQ ID NO: 541

SEQ ID NO: 614 - DNA, 36 bp, Capnocytophaga canimorsus; identical to SEQ ID NO: 545

SEQ ID NO: 615 - DNA, 65 bp, Capnocytophaga canimorsus
taccaagtaatccatatttctagaggatcgttggaactgctctcattttggagggtaatcacaac

SEQ ID NO: 616 - DNA, 29 bp, Capnocytophaga canimorsus
taccaagtaatccatatttctagaggatc

SEQ ID NO: 617 - DNA, 36 bp, Capnocytophaga canimorsus; identical to SEQ ID NO: 545

SEQ ID NO: 618 - DNA, 64 bp, Capnocytophaga canimorsus
accaagtaatccatatttctagaggatcgttggaactgctctcattttggagggtaatcacaac

SEQ ID NO: 619 - DNA, 28 bp, Capnocytophaga canimorsus
accaagtaatccatatttctagaggatc

SEQ ID NO: 620 - DNA, 36 bp, Capnocytophaga canimorsus; identical to SEQ ID NO: 545

SEQ ID NO: 621 - DNA, 63 bp, Capnocytophaga canimorsus
ccaagtaatccatatttctagaggatcgttggaactgctctcattttggagggtaatcacaac

SEQ ID NO: 622 - DNA, 27 bp, Capnocytophaga canimorsus
ccaagtaatccatatttctagaggatc

SEQ ID NO: 623 - DNA, 36 bp, Capnocytophaga canimorsus; identical to SEQ ID NO: 545

SEQ ID NO: 624 - DNA, 62 bp, Capnocytophaga canimorsus
caagtaatccatatttctagaggatcgttggaactgctctcattttggagggtaatcacaac

SEQ ID NO: 625 - DNA, 26 bp, Capnocytophaga canimorsus
caagtaatccatatttctagaggatc

SEQ ID NO: 626 - DNA, 36 bp, Capnocytophaga canimorsus; identical to SEQ ID NO: 545

SEQ ID NO: 627 - DNA, 61 bp, Capnocytophaga canimorsus
aagtaatccatatttctagaggatcgttggaactgctctcattttggagggtaatcacaac

SEQ ID NO: 628 - DNA, 25 bp, Capnocytophaga canimorsus
aagtaatccatatttctagaggatc

SEQ ID NO: 629 - DNA, 36 bp, Capnocytophaga canimorsus; identical to SEQ ID NO: 545

SEQ ID NO: 630 - DNA, 60 bp, Capnocytophaga canimorsus
agtaatccatatttctagaggatcgttggaactgctctcattttggagggtaatcacaac

SEQ ID NO: 631 - DNA, 24 bp, Capnocytophaga canimorsus
agtaatccatatttctagaggatc

SEQ ID NO: 632 - DNA, 36 bp, Capnocytophaga canimorsus; identical to SEQ ID NO: 545

SEQ ID NO: 633 - DNA, 59 bp, Capnocytophaga canimorsus
gtaatccatatttctagaggatcgttggaactgctctcattttggagggtaatcacaac

SEQ ID NO: 634 - DNA, 23 bp, Capnocytophaga canimorsus
gtaatccatatttctagaggatc

SEQ ID NO: 635 - DNA, 36 bp, Capnocytophaga canimorsus; identical to SEQ ID NO: 545

SEQ ID NO: 636 - DNA, 58 bp, Capnocytophaga canimorsus
taatccatatttctagaggatcgttggaactgctctcattttggagggtaatcacaac

SEQ ID NO: 637 - DNA, 22 bp, Capnocytophaga canimorsus
taatccatatttctagaggatc

SEQ ID NO: 638 - DNA, 36 bp, Capnocytophaga canimorsus; identical to SEQ ID NO: 545

SEQ ID NO: 639 - DNA, 57 bp, Capnocytophaga canimorsus
aatccatatttctagaggatcgttggaactgctctcattttggagggtaatcacaac

SEQ ID NO: 640 - DNA, 21 bp, Capnocytophaga canimorsus
aatccatatttctagaggatc

SEQ ID NO: 641 - DNA, 36 bp, Capnocytophaga canimorsus; identical to SEQ ID NO: 545

SEQ ID NO: 642 - DNA, 56 bp, Capnocytophaga canimorsus
atccatatttctagaggatcgttggaactgctctcattttggagggtaatcacaac

SEQ ID NO: 643 - DNA, 20 bp, Capnocytophaga canimorsus
atccatatttctagaggatc

SEQ ID NO: 644 - DNA, 36 bp, Capnocytophaga canimorsus; identical to SEQ ID NO: 545

SEQ ID NO: 645 - DNA, 55 bp, Capnocytophaga canimorsus
tccatatttctagaggatcgttggaactgctctcattttggagggtaatcacaac

SEQ ID NO: 646 - DNA, 19 bp, Capnocytophaga canimorsus
tccatatttctagaggatc

SEQ ID NO: 647 - DNA, 36 bp, Capnocytophaga canimorsus; identical to SEQ ID NO: 545

SEQ ID NO: 648 - DNA, 54 bp, Capnocytophaga canimorsus
ccatatttctagaggatcgttggaactgctctcattttggagggtaatcacaac

SEQ ID NO: 649 - DNA, 18 bp, Capnocytophaga canimorsus
ccatatttctagaggatc

SEQ ID NO: 650 - DNA, 36 bp, Capnocytophaga canimorsus; identical to SEQ ID NO: 545

SEQ ID NO: 651 - DNA, 53 bp, Capnocytophaga canimorsus
catatttctagaggatcgttggaactgctctcattttggagggtaatcacaac

SEQ ID NO: 652 - DNA, 17 bp, Capnocytophaga canimorsus
catatttctagaggatc

SEQ ID NO: 653 - DNA, 36 bp, Capnocytophaga canimorsus; identical to SEQ ID NO: 545

SEQ ID NO: 654 - DNA, 52 bp, Capnocytophaga canimorsus
atatttctagaggatcgttggaactgctctcattttggagggtaatcacaac

SEQ ID NO: 655 - DNA, 16 bp, Capnocytophaga canimorsus
atatttctagaggatc

SEQ ID NO: 656 - DNA, 36 bp, Capnocytophaga canimorsus; identical to SEQ ID NO: 545

SEQ ID NO: 657 - DNA, 51 bp, Capnocytophaga canimorsus
tatttctagaggatcgttggaactgctctcattttggagggtaatcacaac

SEQ ID NO: 658 - DNA, 15 bp, Capnocytophaga canimorsus
tatttctagaggatc

SEQ ID NO: 659 - DNA, 36 bp, Capnocytophaga canimorsus; identical to SEQ ID NO: 545

SEQ ID NO: 660 - DNA, 50 bp, Capnocytophaga canimorsus
atttctagaggatcgttggaactgctctcattttggagggtaatcacaac

SEQ ID NO: 661 - DNA, 14 bp, Capnocytophaga canimorsus
atttctagaggatc

SEQ ID NO: 662 - DNA, 36 bp, Capnocytophaga canimorsus; identical to SEQ ID NO: 545

SEQ ID NO: 663 - DNA, 49 bp, Capnocytophaga canimorsus
tttctagaggatcgttggaactgctctcattttggagggtaatcacaac

SEQ ID NO: 664 - DNA, 13 bp, Capnocytophaga canimorsus
tttctagaggatc

SEQ ID NO: 665 - DNA, 36 bp, Capnocytophaga canimorsus; identical to SEQ ID NO: 545

SEQ ID NO: 666 - DNA, 48 bp, Capnocytophaga canimorsus
ttctagaggatcgttggaactgctctcattttggagggtaatcacaac

SEQ ID NO: 667 - DNA, 12 bp, Capnocytophaga canimorsus
ttctagaggatc

SEQ ID NO: 668 - DNA, 36 bp, Capnocytophaga canimorsus; identical to SEQ ID NO: 545

SEQ ID NO: 669 - DNA, 57 bp, Prevotella species
tgttctaccaagtaatccatatttctagaggatcgttgtagaagcttatcgtttgga

SEQ ID NO: 670 - DNA, 34 bp, Prevotella species; identical to SEQ ID NO: 601

SEQ ID NO: 671 - DNA, 36 bp, Prevotella species; identical to SEQ ID NO: 557

SEQ ID NO: 672 - DNA, 69 bp, Prevotella species
gttctaccaagtaatccatatttctagaggatcgttgtagaagcttatcgtttggataggtatgacaac

SEQ ID NO: 673 - DNA, 33 bp, Prevotella species; identical to SEQ ID NO: 604

SEQ ID NO: 674 - DNA, 36 bp, Prevotella species; identical to SEQ ID NO: 557

SEQ ID NO: 675 - DNA, 68 bp, Prevotella species
ttctaccaagtaatccatatttctagaggatcgttgtagaagcttatcgtttggataggtatgacaac

SEQ ID NO: 676 - DNA, 32 bp, Prevotella species; identical to SEQ ID NO: 607

SEQ ID NO: 677 - DNA, 36 bp, Prevotella species; identical to SEQ ID NO: 557

SEQ ID NO: 678 - DNA, 67 bp, Prevotella species
tctaccaagtaatccatatttctagaggatcgttgtagaagcttatcgtttggataggtatgacaac

SEQ ID NO: 679 - DNA, 31 bp, Prevotella species; identical to SEQ ID NO: 610

SEQ ID NO: 680 - DNA, 36 bp, Prevotella species; identical to SEQ ID NO: 557

SEQ ID NO: 681 - DNA, 66 bp, Prevotella species; identical to SEQ ID NO: 555

SEQ ID NO: 682 - DNA, 30 bp, Prevotella species; identical to SEQ ID NO: 541

SEQ ID NO: 683 - DNA, 36 bp, Prevotella species; identical to SEQ ID NO: 557

SEQ ID NO: 684 - DNA, 65 bp, Prevotella species
taccaagtaatccatatttctagaggatcgttgtagaagcttatcgtttggataggtatgacaac

SEQ ID NO: 685 - DNA, 29 bp, Prevotella species
taccaagtaatccatatttctagaggatc

SEQ ID NO: 686 - DNA, 36 bp, Prevotella species; identical to SEQ ID NO: 557

SEQ ID NO: 687 - DNA, 64 bp, Prevotella species
accaagtaatccatatttctagaggatcgttgtagaagcttatcgtttggataggtatgacaac

SEQ ID NO: 688 - DNA, 28 bp, Prevotella species
accaagtaatccatatttctagaggatc

SEQ ID NO: 689 - DNA, 36 bp, Prevotella species; identical to SEQ ID NO: 557

SEQ ID NO: 690 - DNA, 63 bp, Prevotella species
ccaagtaatccatatttctagaggatcgttgtagaagcttatcgtttggataggtatgacaac

SEQ ID NO: 691 - DNA, 27 bp, Prevotella species
ccaagtaatccatatttctagaggatc

SEQ ID NO: 692 - DNA, 36 bp, Prevotella species; identical to SEQ ID NO: 557

SEQ ID NO: 693 - DNA, 62 bp, Prevotella species
caagtaatccatatttctagaggatcgttgtagaagcttatcgtttggataggtatgacaac

SEQ ID NO: 694 - DNA, 26 bp, Prevotella species
caagtaatccatatttctagaggatc

SEQ ID NO: 695 - DNA, 36 bp, Prevotella species; identical to SEQ ID NO: 557

SEQ ID NO: 696 - DNA, 61 bp, Prevotella species
aagtaatccatatttctagaggatcgttgtagaagcttatcgtttggataggtatgacaac

SEQ ID NO: 697 - DNA, 25 bp, Prevotella species
aagtaatccatatttctagaggatc

SEQ ID NO: 698 - DNA, 36 bp, Prevotella species; identical to SEQ ID NO: 557

SEQ ID NO: 699 - DNA, 60 bp, Prevotella species
agtaatccatatttctagaggatcgttgtagaagcttatcgtttggataggtatgacaac

SEQ ID NO: 700 - DNA, 24 bp, Prevotella species
agtaatccatatttctagaggatc

SEQ ID NO: 701 - DNA, 36 bp, Prevotella species; identical to SEQ ID NO: 557

SEQ ID NO: 702 - DNA, 59 bp, Prevotella species
gtaatccatatttctagaggatcgttgtagaagcttatcgtttggataggtatgacaac

SEQ ID NO: 703 - DNA, 23 bp, Prevotella species
gtaatccatatttctagaggatc

SEQ ID NO: 704 - DNA, 36 bp, Prevotella species; identical to SEQ ID NO: 557

SEQ ID NO: 705 - DNA, 58 bp, Prevotella species
taatccatatttctagaggatcgttgtagaagcttatcgtttggataggtatgacaac

SEQ ID NO: 706 - DNA, 22 bp, Prevotella species
taatccatatttctagaggatc

SEQ ID NO: 707 - DNA, 36 bp, Prevotella species; identical to SEQ ID NO: 557

SEQ ID NO: 708 - DNA, 57 bp, Prevotella species
aatccatatttctagaggatcgttgtagaagcttatcgtttggataggtatgacaac

SEQ ID NO: 709 - DNA, 21 bp, Prevotella species
aatccatatttctagaggatc

SEQ ID NO: 710 - DNA, 36 bp, Prevotella species; identical to SEQ ID NO: 557

SEQ ID NO: 711 - DNA, 56 bp, Prevotella species
atccatatttctagaggatcgttgtagaagcttatcgtttggataggtatgacaac

SEQ ID NO: 712 - DNA, 20 bp, Prevotella species
atccatatttctagaggatc

SEQ ID NO: 713 - DNA, 36 bp, Prevotella species; identical to SEQ ID NO: 557

SEQ ID NO: 714 - DNA, 55 bp, Prevotella species
tccatatttctagaggatcgttgtagaagcttatcgtttggataggtatgacaac

SEQ ID NO: 715 - DNA, 19 bp, Prevotella species
tccatatttctagaggatc

SEQ ID NO: 716 - DNA, 36 bp, Prevotella species; identical to SEQ ID NO: 557

SEQ ID NO: 717 - DNA, 54 bp, Prevotella species
ccatatttctagaggatcgttgtagaagcttatcgtttggataggtatgacaac

SEQ ID NO: 718 - DNA, 18 bp, Prevotella species
ccatatttctagaggatc

SEQ ID NO: 719 - DNA, 36 bp, Prevotella species; identical to SEQ ID NO: 557

SEQ ID NO: 720 - DNA, 53 bp, Prevotella species
catatttctagaggatcgttgtagaagcttatcgtttggataggtatgacaac

SEQ ID NO: 721 - DNA, 17 bp, Prevotella species
catatttctagaggatc

SEQ ID NO: 722 - DNA, 36 bp, Prevotella species; identical to SEQ ID NO: 557

SEQ ID NO: 723 - DNA, 52 bp, Prevotella species
atatttctagaggatcgttgtagaagcttatcgtttggataggtatgacaac

SEQ ID NO: 724 - DNA, 16 bp, Prevotella species
atatttctagaggatc

SEQ ID NO: 725 - DNA, 36 bp, Prevotella species; identical to SEQ ID NO: 557

SEQ ID NO: 726 - DNA, 51 bp, Prevotella species
tatttctagaggatcgttgtagaagcttatcgtttggataggtatgacaac

SEQ ID NO: 727 - DNA, 15 bp, Prevotella species
tatttctagaggatc

SEQ ID NO: 728 - DNA, 36 bp, Prevotella species; identical to SEQ ID NO: 557

SEQ ID NO: 729 - DNA, 50 bp, Prevotella species
atttctagaggatcgttgtagaagcttatcgtttggataggtatgacaac

SEQ ID NO: 730 - DNA, 14 bp, Prevotella species
atttctagaggatc

SEQ ID NO: 731 - DNA, 36 bp, Prevotella species; identical to SEQ ID NO: 557

SEQ ID NO: 732 - DNA, 49 bp, Prevotella species
tttctagaggatcgttgtagaagcttatcgtttggataggtatgacaac

SEQ ID NO: 733 - DNA, 13 bp, Prevotella species
tttctagaggatc

SEQ ID NO: 734 - DNA, 36 bp, Prevotella species; identical to SEQ ID NO: 557

SEQ ID NO: 735 - DNA, 48 bp, Prevotella species
ttctagaggatcgttgtagaagcttatcgtttggataggtatgacaac

SEQ ID NO: 736 - DNA, 12 bp, Prevotella species
ttctagaggatc

SEQ ID NO: 737 - DNA, 36 bp, Prevotella species; identical to SEQ ID NO: 557

SEQ ID NO: 738 - DNA, 64 bp, Leptotrichia wadei
gatttagactaccccaaaaacgaaggggactaaaacccgggtaccgagctcgaattcactggcc

SEQ ID NO: 739 - DNA, 28 bp, Leptotrichia wadei
ccgggtaccgagctcgaattcactggcc

SEQ ID NO: 740 - DNA, 36 bp, Leptotrichia wadei; identical to SEQ ID NO: 542

SEQ ID NO: 741 - DNA, 64 bp, Leptotrichia wadei
gatttagactaccccaaaaacgaaggggactaaaactttctagaggatccccgggtaccgagct

SEQ ID NO: 742 - DNA, 28 bp, Leptotrichia wadei
tttctagaggatccccgggtaccgagct

SEQ ID NO: 743 - DNA, 36 bp, Leptotrichia wadei; identical to SEQ ID NO: 542

SEQ ID NO: 744 - DNA, 64 bp, Leptotrichia wadei
gatttagactaccccaaaaacgaaggggactaaaacccaagtaatccatatttctagaggatcc

SEQ ID NO: 745 - DNA, 28 bp, Leptotrichia wadei
ccaagtaatccatatttctagaggatcc

SEQ ID NO: 746 - DNA, 36 bp, Leptotrichia wadei; identical to SEQ ID NO: 542

SEQ ID NO: 747 - DNA, 64 bp, Leptotrichia wadei
gatttagactaccccaaaaacgaaggggactaaaacagattgctgttctaccaagtaatccata

SEQ ID NO: 748 - DNA, 28 bp, Leptotrichia wadei
agattgctgttctaccaagtaatccata

SEQ ID NO: 749 - DNA, 36 bp, Leptotrichia wadei; identical to SEQ ID NO: 542

SEQ ID NO: 750 - DNA, 64 bp, Leptotrichia wadei
gatttagactaccccaaaaacgaaggggactaaaaccctgcaggtcgagtagattgctgttcta

SEQ ID NO: 751 - DNA, 28 bp, Leptotrichia wadei
cctgcaggtcgagtagattgctgttcta

SEQ ID NO: 752 - DNA, 36 bp, Leptotrichia wadei; identical to SEQ ID NO: 542

SEQ ID NO: 753 - DNA, 64 bp, Leptotrichia wadei
gatttagactaccccaaaaacgaaggggactaaaacgccaagcttgcatgcctgcaggtcgagt

SEQ ID NO: 754 - DNA, 28 bp, Leptotrichia wadei
gccaagcttgcatgcctgcaggtcgagt

SEQ ID NO: 755 - DNA, 36 bp, Leptotrichia wadei; identical to SEQ ID NO: 542

SEQ ID NO: 756 - DNA, 64 bp, Leptotrichia wadei
gatttagactaccccaaaaacgaaggggactaaaacatgaccatgattacgccaagcttgcatg

SEQ ID NO: 757 - DNA, 28 bp, Leptotrichia wadei
atgaccatgattacgccaagcttgcatg

SEQ ID NO: 758 - DNA, 36 bp, Leptotrichia wadei; identical to SEQ ID NO: 542

SEQ ID NO: 759 - DNA, 64 bp, Leptotrichia wadei
gatttagactaccccaaaaacgaaggggactaaaaccacaggaaacagctatgaccatgattac

SEQ ID NO: 760 - DNA, 28 bp, Leptotrichia wadei
cacaggaaacagctatgaccatgattac

SEQ ID NO: 761 - DNA, 36 bp, Leptotrichia wadei; identical to SEQ ID NO: 542

SEQ ID NO: 762 - DNA, 64 bp, Leptotrichia wadei
gatttagactaccccaaaaacgaaggggactaaaactgtgagcggataaacacaggaaacagct

SEQ ID NO: 763 - DNA, 28 bp, Leptotrichia wadei
tgtgagcggataaacacaggaaacagct

SEQ ID NO: 764 - DNA, 36 bp, Leptotrichia wadei; identical to SEQ ID NO: 542

SEQ ID NO: 765 - DNA, 64 bp, Leptotrichia wadei
gatttagactaccccaaaaacgaaggggactaaaacatgttgtgtggaattgtgagcggataaa

SEQ ID NO: 766 - DNA, 28 bp, Leptotrichia wadei
atgttgtgtggaattgtgagcggataaa

SEQ ID NO: 767 - DNA, 36 bp, Leptotrichia wadei; identical to SEQ ID NO: 542

SEQ ID NO: 768 - DNA, 64 bp, Leptotrichia wadei
gatttagactaccccaaaaacgaaggggactaaaactgcttccggctcgtatgttgtgtggaat

SEQ ID NO: 769 - DNA, 28 bp, Leptotrichia wadei
tgcttccggctcgtatgttgtgtggaat

SEQ ID NO: 770 - DNA, 36 bp, Leptotrichia wadei; identical to SEQ ID NO: 542

SEQ ID NO: 771 - DNA, 66 bp, Capnocytophaga canimorsus
ccccgggtaccgagctcgaattcactggccgttggaactgctctcattttggagggtaatcacaac

SEQ ID NO: 772 - DNA, 30 bp, Capnocytophaga canimorsus
ccccgggtaccgagctcgaattcactggcc

SEQ ID NO: 773 - DNA, 36 bp, Capnocytophaga canimorsus; identical to SEQ ID NO: 545

SEQ ID NO: 774 - DNA, 66 bp, Capnocytophaga canimorsus
tatttctagaggatccccgggtaccgagctgttggaactgctctcattttggagggtaatcacaac

SEQ ID NO: 775 - DNA, 30 bp, Capnocytophaga canimorsus
tatttctagaggatccccgggtaccgagct

SEQ ID NO: 776 - DNA, 36 bp, Capnocytophaga canimorsus; identical to SEQ ID NO: 545

SEQ ID NO: 777 - DNA, 66 bp, Capnocytophaga canimorsus
taccaagtaatccatatttctagaggatccgttggaactgctctcattttggagggtaatcacaac

SEQ ID NO: 778 - DNA, 30 bp, Capnocytophaga canimorsus
taccaagtaatccatatttctagaggatcc

SEQ ID NO: 779 - DNA, 36 bp, Capnocytophaga canimorsus; identical to SEQ ID NO: 545

SEQ ID NO: 780 - DNA, 66 bp, Capnocytophaga canimorsus
gtagattgctgttctaccaagtaatccatagttggaactgctctcattttggagggtaatcacaac

SEQ ID NO: 781 - DNA, 30 bp, Capnocytophaga canimorsus
gtagattgctgttctaccaagtaatccata

SEQ ID NO: 782 - DNA, 36 bp, Capnocytophaga canimorsus; identical to SEQ ID NO: 545

SEQ ID NO: 783 - DNA, 66 bp, Capnocytophaga canimorsus
tgcctgcaggtcgagtagattgctgttctagttggaactgctctcattttggagggtaatcacaac

SEQ ID NO: 784 - DNA, 30 bp, Capnocytophaga canimorsus
tgcctgcaggtcgagtagattgctgttcta

SEQ ID NO: 785 - DNA, 36 bp, Capnocytophaga canimorsus; identical to SEQ ID NO: 545

SEQ ID NO: 786 - DNA, 66 bp, Capnocytophaga canimorsus
acgccaagcttgcatgcctgcaggtcgagtgttggaactgctctcattttggagggtaatcacaac

SEQ ID NO: 787 - DNA, 30 bp, Capnocytophaga canimorsus
acgccaagcttgcatgcctgcaggtcgagt

SEQ ID NO: 788 - DNA, 36 bp, Capnocytophaga canimorsus; identical to SEQ ID NO: 545

SEQ ID NO: 789 - DNA, 66 bp, Capnocytophaga canimorsus
ctatgaccatgattacgccaagcttgcatggttggaactgctctcattttggagggtaatcacaac

SEQ ID NO: 790 - DNA, 30 bp, Capnocytophaga canimorsus
ctatgaccatgattacgccaagcttgcatg

SEQ ID NO: 791 - DNA, 36 bp, Capnocytophaga canimorsus; identical to SEQ ID NO: 545

SEQ ID NO: 792 - DNA, 66 bp, Capnocytophaga canimorsus
aacacaggaaacagctatgaccatgattacgttggaactgctctcattttggagggtaatcacaac

SEQ ID NO: 793 - DNA, 24 bp, Capnocytophaga canimorsus
aacacaggaaacagctatgaccat

SEQ ID NO: 794 - DNA, 24 bp, Capnocytophaga canimorsus
gttggaactgctctcattttggag

SEQ ID NO: 795 - DNA, 38 bp, Capnocytophaga canimorsus
attgtgagcggataaacacaggaaacagctgttggaac

SEQ ID NO: 796 - DNA, 24 bp, Capnocytophaga canimorsus
attgtgagcggataaacacaggaa

SEQ ID NO: 797 - DNA, 24 bp, Capnocytophaga canimorsus
gttggaactgctctcattttggag

SEQ ID NO: 798 - DNA, 66 bp, Capnocytophaga canimorsus
gtatgttgtgtggaattgtgagcggataaagttggaactgctctcattttggagggtaatcacaac

SEQ ID NO: 799 - DNA, 24 bp, Capnocytophaga canimorsus
gtatgttgtgtggaattgtgagcg

SEQ ID NO: 800 - DNA, 24 bp, Capnocytophaga canimorsus
gttggaactgctctcattttggag

SEQ ID NO: 801 - DNA, 57 bp, Capnocytophaga canimorsus
tatgcttccggctcgtatgttgtgtggaatgttggaactgctctcattttggagggt

SEQ ID NO: 802 - DNA, 30 bp, Capnocytophaga canimorsus
tatgcttccggctcgtatgttgtgtggaat

SEQ ID NO: 803 - DNA, 24 bp, Capnocytophaga canimorsus
gttggaactgctctcattttggag

SEQ ID NO: 804 - DNA, 57 bp, Prevotella species
ccccgggtaccgagctcgaattcactggccgttgtagaagcttatcgtttggatagg

SEQ ID NO: 805 - DNA, 24 bp, Prevotella species
ccccgggtaccgagctcgaattca

SEQ ID NO: 806 - DNA, 24 bp, Prevotella species
gttgtagaagcttatcgtttggat

SEQ ID NO: 807 - DNA, 57 bp, Prevotella species
tatttctagaggatccccgggtaccgagctgttgtagaagcttatcgtttggatagg

SEQ ID NO: 808 - DNA, 24 bp, Prevotella species
tatttctagaggatccccgggtac

SEQ ID NO: 809 - DNA, 24 bp, Prevotella species
gttgtagaagcttatcgtttggat

SEQ ID NO: 810 - DNA, 57 bp, Prevotella species
taccaagtaatccatatttctagaggatccgttgtagaagcttatcgtttggatagg

SEQ ID NO: 811 - DNA, 30 bp, Prevotella species; identical to SEQ ID NO: 778

SEQ ID NO: 812 - DNA, 24 bp, Prevotella species
gttgtagaagcttatcgtttggat

SEQ ID NO: 813 - DNA, 57 bp, Prevotella species
gtagattgctgttctaccaagtaatccatagttgtagaagcttatcgtttggatagg

SEQ ID NO: 814 - DNA, 24 bp, Prevotella species
gtagattgctgttctaccaagtaa

SEQ ID NO: 815 - DNA, 24 bp, Prevotella species
gttgtagaagcttatcgtttggat

SEQ ID NO: 816 - DNA, 57 bp, Prevotella species
tgcctgcaggtcgagtagattgctgttctagttgtagaagcttatcgtttggatagg

SEQ ID NO: 817 - DNA, 24 bp, Prevotella species
tgcctgcaggtcgagtagattgct

SEQ ID NO: 818 - DNA, 24 bp, Prevotella species
gttgtagaagcttatcgtttggat

SEQ ID NO: 819 - DNA, 57 bp, Prevotella species
acgccaagcttgcatgcctgcaggtcgagtgttgtagaagcttatcgtttggatagg

SEQ ID NO: 820 - DNA, 24 bp, Prevotella species
acgccaagcttgcatgcctgcagg

SEQ ID NO: 821 - DNA, 24 bp, Prevotella species
gttgtagaagcttatcgtttggat

SEQ ID NO: 822 - DNA, 57 bp, Prevotella species
ctatgaccatgattacgccaagcttgcatggttgtagaagcttatcgtttggatagg

SEQ ID NO: 823 - DNA, 24 bp, Prevotella species
ctatgaccatgattacgccaagct

SEQ ID NO: 824 - DNA, 24 bp, Prevotella species
gttgtagaagcttatcgtttggat

SEQ ID NO: 825 - DNA, 57 bp, Prevotella species
aacacaggaaacagctatgaccatgattacgttgtagaagcttatcgtttggatagg

SEQ ID NO: 826 - DNA, 24 bp, Prevotella species
aacacaggaaacagctatgaccat

SEQ ID NO: 827 - DNA, 24 bp, Prevotella species
gttgtagaagcttatcgtttggat

SEQ ID NO: 828 - DNA, 57 bp, Prevotella species
attgtgagcggataaacacaggaaacagctgttgtagaagcttatcgtttggatagg

SEQ ID NO: 829 - DNA, 24 bp, Prevotella species
attgtgagcggataaacacaggaa

SEQ ID NO: 830 - DNA, 36 bp, Prevotella species; identical to SEQ ID NO: 557

SEQ ID NO: 831 - DNA, 57 bp, Prevotella species
gtatgttgtgtggaattgtgagcggataaagttgtagaagcttatcgtttggatagg

SEQ ID NO: 832 - DNA, 24 bp, Prevotella species
gtatgttgtgtggaattgtgagcg

SEQ ID NO: 833 - DNA, 24 bp, Prevotella species
gttgtagaagcttatcgtttggat

SEQ ID NO: 834 - DNA, 57 bp, Prevotella species
tatgcttccggctcgtatgttgtgtggaatgttgtagaagcttatcgtttggatagg

SEQ ID NO: 835 - DNA, 24 bp, Prevotella species
tatgcttccggctcgtatgttgtg

SEQ ID NO: 836 - DNA, 24 bp, Prevotella species
gttgtagaagcttatcgtttggat

SEQ ID NO: 837 - DNA, 57 bp, Zika virus
cttgaactctaccagtgcttctttgttgttgttggaactgctctcattttggagggt

SEQ ID NO: 838 - DNA, 24 bp, Capnocytophaga canimorsus
cttgaactctaccagtgcttcttt

SEQ ID NO: 839 - DNA, 36 bp, Zika virus; identical to SEQ ID NO: 545

SEQ ID NO: 840 - DNA, 57 bp, Dengue virus
tttgcttctgtccagtgagcatggtcttcggttggaactgctctcattttggagggt

SEQ ID NO: 841 - DNA, 24 bp, Capnocytophaga canimorsus
tttgcttctgtccagtgagcatgg

SEQ ID NO: 842 - DNA, 36 bp, Dengue virus; identical to SEQ ID NO: 545

SEQ ID NO: 843 - DNA, 57 bp, Homo sapiens
ccgcttcaccggctacccctgctccaagagttgtagaagcttatcgtttggataggt

SEQ ID NO: 844 - DNA, 24 bp, Homo sapiens
ccgcttcaccggctacccctgctc

SEQ ID NO: 845 - DNA, 24 bp, Homo sapiens
gttgtagaagcttatcgtttggat

SEQ ID NO: 846 - DNA, 57 bp, Homo sapiens
gatttagactaccccaaaaacgaaggggactaaaacctgcaccttctaccaccacct

SEQ ID NO: 847 - DNA, 24 bp, Homo sapiens
ctgcaccttctaccaccacctccg

SEQ ID NO: 848 - DNA, 24 bp, Homo sapiens
gatttagactaccccaaaaacgaa

SEQ ID NO: 849 - DNA, 64 bp, Artificial Sequence
  Synthetic Oligonucleotide
gatttagactaccccaaaaacgaaggggactaaaactagattgctgttctaccaagtaatccat

SEQ ID NO: 850 - DNA, 28 bp, Artificial Sequence
  Synthetic Oligonucleotide
tagattgctgttctaccaagtaatccat

SEQ ID NO: 851 - DNA, 36 bp, Artificial Sequence; identical to SEQ ID NO: 542
  Synthetic Oligonucleotide

SEQ ID NO: 852 - DNA, 57 bp, Homo sapiens
gatttagactaccccaaaaacgaaggggactaaaacgcaagatgagctgcacggtgg

SEQ ID NO: 853 - DNA, 28 bp, Homo sapiens
gcaagatgagctgcacggtggaggtgag

SEQ ID NO: 854 - DNA, 24 bp, Homo sapiens
gatttagactaccccaaaaacgaa

SEQ ID NO: 855 - DNA, 57 bp, Homo sapiens
gatttagactaccccaaaaacgaaggggactaaaacgcgtcatgagctgcacggtgg

SEQ ID NO: 856 - DNA, 28 bp, Homo sapiens
gcgtcatgagctgcacggtggaggtgag

SEQ ID NO: 857 - DNA, 24 bp, Homo sapiens
gatttagactaccccaaaaacgaa

SEQ ID NO: 858 - DNA, 57 bp, Prevotella species
tagattgctgttctaccaagtaatccatatgttgtagaagcttatcgtttggatagg

SEQ ID NO: 859 - DNA, 24 bp, Prevotella species
tagattgctgttctaccaagtaat

SEQ ID NO: 860 - DNA, 24 bp, Prevotella species
gttgtagaagcttatcgtttggat

SEQ ID NO: 861 - DNA, 57 bp, Leptotrichia wadei
gatttagactaccccaaaaacgaaggggactaaaacgattgctgttctaccaagtaa

SEQ ID NO: 862 - DNA, 24 bp, Leptotrichia wadei
gattgctgttctaccaagtaatcc

SEQ ID NO: 863 - DNA, 24 bp, Leptotrichia wadei
gatttagactaccccaaaaacgaa

SEQ ID NO: 864 - RNA, 170 nt, Dengue virus
aguacauauucaggggccaaccucucaacaaugacgaagaccaugcucacuggacagaagcaaaaaugcugcuggacaacaucaacacaccagaagggauuauaccagcucucuuugaaccagaaagggagaagucagccgccauagacggugaauaccgccugaagggu

SEQ ID NO: 865 - DNA, 173 bp, Artificial Sequence; identical to SEQ ID NO: 128
  Synthetic Oligonucleotide

SEQ ID NO: 866 - RNA, 174 nt, Zika virus
gacaccggaacuccacacuggaacaacaaagaagcacugguagaguucaaggacgcacaugccaaaaggcaaacugucgugguucuagggagucaagaaggagcaguucacacggcccuugcuggagcucuggaggcugagauggauggugcaaagggaaggcuguccucuggc

SEQ ID NO: 867 - DNA, 190 bp, Homo sapiens
ttaattaaagcgattgatggtgatactgttaaattaatgtacaaaggtcaaccaatgacattcagactattattggttgatacacctgaaacaaagcatcctaaaaaaggtgtagagaaatatggtcctgaagcaagtgcatttacgaaaaagatggtagaaaatgcaaagaaaattgaagtcgagtttg

SEQ ID NO: 868 - DNA, 190 bp, Homo sapiens
ggggaggatgtcgggcgcgcacgttttcccttcgctgagcacgctgcgcgcgtcgcctacgtgaatgcgctgttcgatgcgttggccgaaggcaacccgcgggtgagcgtgctcgacccctccagcgtgctctgcgatggcctggattgtttcgccgaacgtgatggctggtcgctgtacatggataaca

SEQ ID NO: 869 - RNA, 173 nt, Artificial Sequence
  Synthetic Oligonucleotide
ggccagugaauucgagcucgguacccggggauccucuagaaauauggauuacuugguagaacagcaaucuacucgaccugcaggcaugcaagcuuggcguaaucauggucauagcuguuuccuguguuuauccgcucacaauuccacacaacauacgagccggaagcauaaag

SEQ ID NO: 870 - DNA, 66 bp, Artificial Sequence
  Synthetic Oligonucleotide
  misc_feature (29)..(29): n is a, c, g, or t
  misc_feature (31)..(31): n is a, c, g, or t
  misc_feature (33)..(33): n is a, c, g, or t
  misc_feature (35)..(35): n is a, c, g, or t
  misc_feature (37)..(37): n is a, c, g, or t
  misc_feature (39)..(39): n is a, c, g, or t
ttcctgtgaagctaaagaaggagaatgrnrnrnrnrnrntattgatagcagctgtggcacctgcac

SEQ ID NO: 871 - DNA, 182 bp, Homo sapiens
tgccagttaacgtcttccttctctctctgtcatagggactctggatcccagaaggtgagaaagttaaaattcccgtcgctatcaagacatctccgaaagccaacaaggaaatcctcgatgtgagtttctgctttgctgtgtgggggtccatggctctgaacctcaggcccaccttttctcat

SEQ ID NO: 872 - DNA, 197 bp, Homo sapiens
tgccagttaacgtcttccttctctctctgtcatagggactctggatcccagaaggtgagaaagttaaaattcccgtcgctatcaaggaattaagagaagcaacatctccgaaagccaacaaggaaatcctcgatgtgagtttctgctttgctgtgtgggggtccatggctctgaacctcaggcccaccttttctcat

SEQ ID NO: 873 - DNA, 194 bp, Artificial Sequence
  Synthetic Oligonucleotide
cctccctccaggaagcctacgtgatggccagcgtggacaacccccacgtgtgccgcctgctgggcatctgcctcacctccaccgtgcagctcatcatgcagctcatgcccttcggctgcctcctggactatgtccgggaacacaaagacaatattggctcccagtacctgctcaactggtgtgtgcagatcgca

SEQ ID NO: 874 - DNA, 194 bp, Homo sapiens
cctccctccaggaagcctacgtgatggccagcgtggacaacccccacgtgtgccgcctgctgggcatctgcctcacctccaccgtgcagctcatcacgcagctcatgcccttcggctgcctcctggactatgtccgggaacacaaagacaatattggctcccagtacctgctcaactggtgtgtgcagatcgca

SEQ ID NO: 875 - RNA, 171 nt, Leptotrichia wadei
uagguguuccacaggguagccagcagcauccugcgaugcaaauauggauuacuugguagaacagcaaucuaauccggaacauaauggugcagggcgcugacuuccgcguuuguuuuaaaucaaacacggaaaccgaagaccauucauguuguugcugccggaagcauaaag

SEQ ID NO: 876 - RNA, 171 nt, Prevotella species
uagguguuccacaggguagccagcagcauccugcgaugcaaauauggauuacuugguagaacagcaaucuaauccggaacauaauggugcagggcgcugacuuccgcguuugaaaaaaaacaaacacggaaaccgaagaccauucauguuguugcugccggaagcauaaag

SEQ ID NO: 877 - DNA, 25 bp, Artificial Sequence
  Synthetic Primer
gtacatattcaggggccaacctctc

SEQ ID NO: 878 - DNA, 50 bp, Artificial Sequence
  Synthetic Primer
gaaattaatacgactcactataggggtacatattcaggggccaacctctc

SEQ ID NO: 879 - DNA, 25 bp, Artificial Sequence
  Synthetic Primer
tttctggttcaaagagagctggtat

SEQ ID NO: 880 - DNA, 28 bp, Artificial Sequence
  Synthetic Primer
tgtacaaaggtcaaccaatgacattcag

SEQ ID NO: 881 - DNA, 53 bp, Artificial Sequence
  Synthetic Primer
gaaattaatacgactcactatagggtgtacaaaggtcaaccaatgacattcag

SEQ ID NO: 882 - DNA, 25 bp, Artificial Sequence
  Synthetic Primer
tgcacttgcttcaggaccatatttc

SEQ ID NO: 883 - DNA, 23 bp, Artificial Sequence
  Synthetic Primer
ctacgtgaatgcgctgttcgatg

SEQ ID NO: 884 - DNA, 48 bp, Artificial Sequence
  Synthetic Primer
gaaattaatacgactcactatagggctacgtgaatgcgctgttcgatg

SEQ ID NO: 885 - DNA, 24 bp, Artificial Sequence
  Synthetic Primer
gaaacaatccaggccatcgcagag

SEQ ID NO: 886 - DNA, 30 bp, Artificial Sequence
  Synthetic Primer
tctggatcccagaaggtgagaaagttaaaa

SEQ ID NO: 887 - DNA, 55 bp, Artificial Sequence
  Synthetic Primer
gaaattaatacgactcactatagggtctggatcccagaaggtgagaaagttaaaa

SEQ ID NO: 888 - DNA, 30 bp, Artificial Sequence
  Synthetic Primer
ccacacagcaaagcagaaactcacatcgag

SEQ ID NO: 889 - DNA, 30 bp, Artificial Sequence; identical to SEQ ID NO: 886
  Synthetic Primer

SEQ ID NO: 890 - DNA, 55 bp, Artificial Sequence; identical to SEQ ID NO: 887
  Synthetic Primer

SEQ ID NO: 891 - DNA, 30 bp, Artificial Sequence; identical to SEQ ID NO: 888
  Synthetic Primer

SEQ ID NO: 892 - DNA, 32 bp, Artificial Sequence
  Synthetic Primer
agggccgccactccaccggcggcatggatgag

SEQ ID NO: 893 - DNA, 57 bp, Artificial Sequence
  Synthetic Primer
gaaattaatacgactcactatagggagggccgccactccaccggcggcatggatgag

SEQ ID NO: 894 - DNA, 33 bp, Artificial Sequence
  Synthetic Primer
gaagagttcttcacctttactcacggatcctcc

SEQ ID NO: 895 - DNA, 25 bp, Artificial Sequence
  Synthetic Primer
ccacactggaacaacaaagaagcac

SEQ ID NO: 896 - DNA, 50 bp, Artificial Sequence
  Synthetic Primer
gaaattaatacgactcactatagggccacactggaacaacaaagaagcac

SEQ ID NO: 897 - DNA, 30 bp, Artificial Sequence
  Synthetic Primer
acagccttccctttgcaccatccatctcag

SEQ ID NO: 898 - DNA, 32 bp, Artificial Sequence
  Synthetic Primer
atagtcccctcggcgaacatggacccctacaa

SEQ ID NO: 899 - DNA, 57 bp, Artificial Sequence; identical to SEQ ID NO: 357
  Synthetic Primer

SEQ ID NO: 900 - DNA, 32 bp, Artificial Sequence; identical to SEQ ID NO: 356
  Synthetic Primer

SEQ ID NO: 901 - DNA, 34 bp, Artificial Sequence
  Synthetic Primer
atcctctagaaatatggattacttggtagaacag

SEQ ID NO: 902 - DNA, 59 bp, Artificial Sequence; identical to SEQ ID NO: 340
  Synthetic Primer

SEQ ID NO: 903 - DNA, 35 bp, Artificial Sequence; identical to SEQ ID NO: 341
  Synthetic Primer

SEQ ID NO: 904 - DNA, 30 bp, Artificial Sequence
  Synthetic Primer
ccccacgtgtgccgcctgctgggcatctgc

SEQ ID NO: 905 - DNA, 55 bp, Artificial Sequence
  Synthetic Primer
gaaattaatacgactcactatagggccccacgtgtgccgcctgctgggcatctgc

SEQ ID NO: 906 - DNA, 30 bp, Artificial Sequence
  Synthetic Primer
atattgtctttgtgttcccggacatagtcc

SEQ ID NO: 907 - RNA, 5 nt, Artificial Sequence
  Synthetic Oligonucleotide
  misc_feature (1)..(1): 5' 6-FAM tag
  misc_feature (5)..(5): 3' 3IABkFQ tag
  misc_feature (5)..(5): 3' IABkFQ tag
uuuuu

SEQ ID NO: 908 - RNA, 5 nt, Artificial Sequence
  Synthetic Oligonucleotide
  misc_feature (1)..(1): 5' 6-FAM tag
  misc_feature (5)..(5): 3' IABkFQ tag
aaaaa

SEQ ID NO: 909 - RNA, 5 nt, Artificial Sequence
  Synthetic Oligonucleotide
  misc_feature (1)..(1): 5' HEX tag
  misc_feature (5)..(5): 3' IABkFQ tag
uuuuu

SEQ ID NO: 910 - DNA, 6 bp, Artificial Sequence
  Synthetic Oligonucleotide
  misc_feature (1)..(1): 5' 6-FAM tag
  misc_feature (3)..(4): RNA nucleotide
  misc_feature (6)..(6): 3' IABkFQ tag
taaagc

SEQ ID NO: 911 - DNA, 6 bp, Artificial Sequence
  Synthetic Oligonucleotide
  misc_feature (1)..(1): 5' 6-FAM tag
  misc_feature (3)..(4): RNA nucleotide
  misc_feature (6)..(6): 3' IABkFQ tag
taaugc

SEQ ID NO: 912 - DNA, 6 bp, Artificial Sequence
  Synthetic Oligonucleotide
  misc_feature (1)..(1): 5' 6-FAM tag
  misc_feature (3)..(4): RNA nucleotide
  misc_feature (6)..(6): 3' IABkFQ tag
taacgc

SEQ ID NO: 913 - DNA, 6 bp, Artificial Sequence
  Synthetic Oligonucleotide
  misc_feature (1)..(1): 5' 6-FAM tag
  misc_feature (3)..(4): RNA nucleotide
  misc_feature (6)..(6): 3' IABkFQ tag
taaggc

SEQ ID NO: 914 - DNA, 6 bp, Artificial Sequence
  Synthetic Oligonucleotide
  misc_feature (1)..(1): 5' 6-FAM tag
  misc_feature (3)..(4): RNA nucleotide
  misc_feature (6)..(6): 3' IABkFQ tag
tauagc

SEQ ID NO: 915 - DNA, 6 bp, Artificial Sequence
  Synthetic Oligonucleotide
  misc_feature (1)..(1): 5' 6-FAM tag
  misc_feature (3)..(4): RNA nucleotide
  misc_feature (6)..(6): 3' IABkFQ tag
tauugc

SEQ ID NO: 916 - DNA, 6 bp, Artificial Sequence
  Synthetic Oligonucleotide
  misc_feature (1)..(1): 5' 6-FAM tag
  misc_feature (3)..(4): RNA nucleotide
  misc_feature (6)..(6): 3' IABkFQ tag
taucgc

SEQ ID NO: 917 - DNA, 6 bp, Artificial Sequence
  Synthetic Oligonucleotide
  misc_feature (1)..(1): 5' 6-FAM tag
  misc_feature (3)..(4): RNA nucleotide
  misc_feature (6)..(6): 3' IABkFQ tag
tauggc

SEQ ID NO: 918 - DNA, 6 bp, Artificial Sequence
  Synthetic Oligonucleotide
  misc_feature (1)..(1): 5' 6-FAM tag
  misc_feature (3)..(4): RNA nucleotide
  misc_feature (6)..(6): 3' IABkFQ tag
tacagc

SEQ ID NO: 919 - DNA, 6 bp, Artificial Sequence
  Synthetic Oligonucleotide
  misc_feature (1)..(1): 5' 6-FAM tag
  misc_feature (3)..(4): RNA nucleotide
  misc_feature (6)..(6): 3' IABkFQ tag
tacugc

SEQ ID NO: 920 - DNA, 6 bp, Artificial Sequence
  Synthetic Oligonucleotide
  misc_feature (1)..(1): 5' 6-FAM tag
  misc_feature (3)..(4): RNA nucleotide
  misc_feature (6)..(6): 3' IABkFQ tag
taccgc

SEQ ID NO: 921 - DNA, 6 bp, Artificial Sequence
  Synthetic Oligonucleotide
  misc_feature (1)..(1): 5' 6-FAM tag
  misc_feature (3)..(4): RNA nucleotide
  misc_feature (6)..(6): 3' IABkFQ tag
tacggc

SEQ ID NO: 922 - DNA, 6 bp, Artificial Sequence
  Synthetic Oligonucleotide
  misc_feature (1)..(1): 5' 6-FAM tag
  misc_feature (3)..(4): RNA nucleotide
  misc_feature (6)..(6): 3' IABkFQ tag
tagagc

SEQ ID NO: 923 - DNA, 6 bp, Artificial Sequence
  Synthetic Oligonucleotide
  misc_feature (1)..(1): 5' 6-FAM tag
  misc_feature (3)..(4): RNA nucleotide
  misc_feature (6)..(6): 3' IABkFQ tag
tagugc

SEQ ID NO: 924 - DNA, 6 bp, Artificial Sequence
  Synthetic Oligonucleotide
  misc_feature (1)..(1): 5' 6-FAM tag
  misc_feature (3)..(4): RNA nucleotide
  misc_feature (6)..(6): 3' IABkFQ tag
tagcgc

SEQ ID NO: 925 - DNA, 6 bp, Artificial Sequence
  Synthetic Oligonucleotide
  misc_feature (1)..(1): 5' 6-FAM tag
  misc_feature (3)..(4): RNA nucleotide
  misc_feature (6)..(6): 3' IABkFQ tag
tagggc

SEQ ID NO: 926 - RNA, 5 nt, Artificial Sequence
  Synthetic Oligonucleotide
  misc_feature (1)..(1): 5' Cy5 tag
  misc_feature (5)..(5): 3' IAbRQSp tag
uuuuu

SEQ ID NO: 927 - DNA, 14 bp, Artificial Sequence
  Synthetic Oligonucleotide
  misc_feature (1)..(1): 5' 6-FAM tag
  misc_feature (1)..(1): methyl modification
  misc_feature (2)..(6): RNA nucleotide
  misc_feature (7)..(8): methyl modification
  misc_feature (9)..(13): RNA nucleotide
  misc_feature (14)..(14): methyl modification
  misc_feature (14)..(14): 3' biotin tag
aauggcaaauggca

SEQ ID NO: 928 - RNA, 5 nt, Artificial Sequence
  Synthetic Oligonucleotide
  misc_feature (1)..(1): 5' 6-FAM tag
  misc_feature (5)..(5): 3' IABkFQ tag
ccccc

SEQ ID NO: 929 - RNA, 5 nt, Artificial Sequence
  Synthetic Oligonucleotide
  misc_feature (1)..(1): 5' 6-FAM tag
  misc_feature (5)..(5): 3' IABkFQ tag
ggggg

SEQ ID NO: 930 - DNA, 60 bp, Artificial Sequence
  Synthetic Oligonucleotide
  misc_feature (28)..(33): RNA nucleotide
ttcctgtgaagctaaagaaggagaatgnnnnnntattgatagcagctgtggcacctgcac

SEQ ID NO: 931 - DNA, 7 bp, Artificial Sequence
  Synthetic Oligonucleotide
  misc_feature (1)..(1): 5' 6-FAM tag
  misc_feature (2)..(7): RNA nucleotide
  misc_feature (7)..(7): 3' IABkFQ tag
tguuuuc

SEQ ID NO: 932 - DNA, 7 bp, Artificial Sequence
  Synthetic Oligonucleotide
  misc_feature (1)..(1): 5' 6-FAM tag
  misc_feature (2)..(7): RNA nucleotide
  misc_feature (7)..(7): 3' IABkFQ tag
tuuuuuc

SEQ ID NO: 933 - DNA, 7 bp, Artificial Sequence
  Synthetic Oligonucleotide
  misc_feature (1)..(1): 5' 6-FAM tag
  misc_feature (2)..(7): RNA nucleotide
  misc_feature (7)..(7): 3' IABkFQ tag
tcauuug

SEQ ID NO: 934 - DNA, 7 bp, Artificial Sequence
  Synthetic Oligonucleotide
  misc_feature (1)..(1): 5' 6-FAM tag
  misc_feature (2)..(7): RNA nucleotide
  misc_feature (7)..(7): 3' IABkFQ tag
tuauuga

SEQ ID NO: 935 - DNA, 7 bp, Artificial Sequence
  Synthetic Oligonucleotide
  misc_feature (1)..(1): 5' 6-FAM tag
  misc_feature (2)..(7): RNA nucleotide
  misc_feature (7)..(7): 3' IABkFQ tag
tauugau

SEQ ID NO: 936 - DNA, 7 bp, Artificial Sequence
  Synthetic Oligonucleotide
  misc_feature (1)..(1): 5' 6-FAM tag
  misc_feature (2)..(7): RNA nucleotide
  misc_feature (7)..(7): 3' IABkFQ tag
tuugaua

SEQ ID NO: 937 - DNA, 7 bp, Artificial Sequence
  Synthetic Oligonucleotide
  misc_feature (1)..(1): 5' 6-FAM tag
  misc_feature (2)..(7): RNA nucleotide
  misc_feature (7)..(7): 3' IABkFQ tag
tuuuguu

SEQ ID NO: 938 - DNA, 7 bp, Artificial Sequence
  Synthetic Oligonucleotide
  misc_feature (1)..(1): 5' 6-FAM tag
  misc_feature (2)..(7): RNA nucleotide
  misc_feature (7)..(7): 3' IABkFQ tag
tuguuuu

SEQ ID NO: 939 - DNA, 7 bp, Artificial Sequence
  Synthetic Oligonucleotide
  misc_feature (1)..(1): 5' 6-FAM tag
  misc_feature (2)..(7): RNA nucleotide
  misc_feature (7)..(7): 3' IABkFQ tag
tauuuuu

SEQ ID NO: 940 - DNA, 7 bp, Artificial Sequence
  Synthetic Oligonucleotide
  misc_feature (1)..(1): 5' 6-FAM tag
  misc_feature (2)..(7): RNA nucleotide
  misc_feature (7)..(7): 3' IABkFQ tag
tcgaaug

SEQ ID NO: 941 - DNA, 7 bp, Artificial Sequence
  Synthetic Oligonucleotide
  misc_feature (1)..(1): 5' 6-FAM tag
  misc_feature (2)..(7): RNA nucleotide
  misc_feature (7)..(7): 3' IABkFQ tag
tgucucc

SEQ ID NO: 942 - DNA, 7 bp, Artificial Sequence
  Synthetic Oligonucleotide
  misc_feature (1)..(1): 5' 6-FAM tag
  misc_feature (2)..(7): RNA nucleotide
  misc_feature (7)..(7): 3' IABkFQ tag
tgcauga

SEQ ID NO: 943 - DNA, 7 bp, Artificial Sequence
  Synthetic Oligonucleotide
  misc_feature (1)..(1): 5' 6-FAM tag
  misc_feature (2)..(7): RNA nucleotide
  misc_feature (7)..(7): 3' IABkFQ tag
tcauaca

SEQ ID NO: 944 - DNA, 7 bp, Artificial Sequence
  Synthetic Oligonucleotide
  misc_feature (1)..(1): 5' 6-FAM tag
  misc_feature (2)..(7): RNA nucleotide
  misc_feature (7)..(7): 3' IABkFQ tag
tcauacg

SEQ ID NO: 945 - DNA, 7 bp, Artificial Sequence
  Synthetic Oligonucleotide
  misc_feature (1)..(1): 5' 6-FAM tag
  misc_feature (2)..(7): RNA nucleotide
  misc_feature (7)..(7): 3' IABkFQ tag
tgcauaa

SEQ ID NO: 946 - DNA, 7 bp, Artificial Sequence
  Synthetic Oligonucleotide
  misc_feature (1)..(1): 5' 6-FAM tag
  misc_feature (2)..(7): RNA nucleotide
  misc_feature (7)..(7): 3' IABkFQ tag
tcuacuu

SEQ ID NO: 947 - DNA, 7 bp, Artificial Sequence
  Synthetic Oligonucleotide
  misc_feature (1)..(1): 5' 6-FAM tag
  misc_feature (2)..(7): RNA nucleotide
  misc_feature (7)..(7): 3' IABkFQ tag
tcuacgu

SEQ ID NO: 948 - DNA, 7 bp, Artificial Sequence
  Synthetic Oligonucleotide
  misc_feature (1)..(1): 5' 6-FAM tag
  misc_feature (2)..(7): RNA nucleotide
  misc_feature (7)..(7): 3' IABkFQ tag
tuuaaac

SEQ ID NO: 949 - RNA, 46 nt, Artificial Sequence
  Synthetic Oligonucleotide
  misc_feature (1)..(1): 5' ThioMC6- D tag
  misc_feature (46)..(46): 3' ThioMC 3-D tag
cucccuaauaacaauuuauaacuauuccuacccuuucccaaaaaaa

SEQ ID NO: 950 - DNA, 47 bp, Artificial Sequence
  Synthetic Oligonucleotide
  misc_feature (1)..(1): 5' amino modifier AmMC12
  misc_feature (21)..(28): RNA nucleotide
  misc_feature (30)..(31): biotin-tagged RNA linker
  misc_feature (47)..(47): 3' 6-FAM tag
agagcatcaccatgatcctguuuuuuuutgctcggatatctcgacta

SEQ ID NO: 951 - DNA, 7 bp, Artificial Sequence
  Synthetic Oligonucleotide
  misc_feature (1)..(1): 5' 6-FAM tag
  misc_feature (2)..(7): RNA nucleotide
  misc_feature (7)..(7): 3' IABkFQ tag
tgacgug

SEQ ID NO: 952 - RNA, 6 nt, Artificial Sequence
  Synthetic Oligonucleotide
  misc_feature (1)..(1): 5' FamCE tag
  misc_feature (6)..(6): 3' BioBB modification
aaaaaa

SEQ ID NO: 953 - RNA, 12 nt, Artificial Sequence
  Synthetic Oligonucleotide
  misc_feature (1)..(1): 5' FamCE tag
  misc_feature (12)..(12): 3' BioBB modification
aaaaaaaaaaaa

SEQ ID NO: 954 - RNA, 6 nt, Artificial Sequence
  Synthetic Oligonucleotide
  misc_feature (1)..(1): 5' 6-FAM tag
  misc_feature (6)..(6): 3' biotin tag
cccccc

SEQ ID NO: 955 - RNA, 12 nt, Artificial Sequence
  Synthetic Oligonucleotide
  misc_feature (1)..(1): 5' 6-FAM tag
  misc_feature (12)..(12): 3' biotin tag
cccccccccccc

SEQ ID NO: 956 - RNA, 6 nt, Artificial Sequence
  Synthetic Oligonucleotide
  misc_feature (1)..(1): 5' 6-FAM tag
  misc_feature (6)..(6): 3' biotin tag
acacac
